(19) United States
(12) Patent Application Publication
(10) Pub. No.: US 2023/0374105 A1
(43) Pub. Date: Nov. 23, 2023

(54) CD20 THERAPIES, CD22 THERAPIES, AND COMBINATION THERAPIES WITH A CD19 CHIMERIC ANTIGEN RECEPTOR (CAR)-EXPRESSING CELL

(71) Applicants: Novartis AG, Basel (CH); The Trustees of the University of Pennsylvania, Philadelphia, PA (US)

(72) Inventors: Hans Bitter, Lincoln, MA (US); Jennifer Mary Bordeaux, Carlsbad, CA (US); Barbara Brannetti, Cambridge, MA (US); Jennifer Brogdon, Sudbury, MA (US); Naveen Kumar Dakappagari, Carlsbad, CA (US); Saar Gill, Philadelphia, PA (US); Steven Highfill, Bethesda, MD (US); Lu Huang, West Roxbury, MA (US); Carl H. June, Merion Station, PA (US); Ju Young Kim, Carlsbad, CA (US); Ming Lei, Acton, MA (US); Na Li, Cambridge, MA (US); Andreas Loew, Boston, MA (US); Elena Orlando, Somerville, MA (US); Marco Ruella, Ardmore, PA (US); Thai Tran, Carlsbad, CA (US); Jimin Zhang, Cambridge, MA (US); Li Zhou, Cambridge, MA (US)

(21) Appl. No.: 18/339,565

(22) Filed: Jun. 22, 2023

Related U.S. Application Data
(63) Continuation of application No. 17/464,528, filed on Sep. 1, 2021.
Application No. 17/464,528 is a division of application No. 16/256,731, filed on Jan. 24, 2019, now Pat. No. 11,149,076.
Application No. 16/256,731 is a division of application No. 15/094,674, filed on Apr. 8, 2016, now Pat. No. 10,253,086.
(60) Provisional application No. 62/263,423, filed on Dec. 4, 2015.
(60) Provisional application No. 62/207,255, filed on Aug. 19, 2015.
(60) Provisional application No. 62/144,639, filed on Apr. 8, 2015.
(60) Provisional application No. 62/144,497, filed on Apr. 8, 2015.
(60) Provisional application No. 62/144,615, filed on Apr. 8, 2015.

(51) Int. Cl. C07K 14/705; C07K 14/725; C07K 16/28; A61K 45/06; A61K 39/00

(52) U.S. Cl. CPC C07K 14/70596; C07K 14/7051; C07K 16/2803; C07K 16/2866; A61K 45/06; A61K 39/001112; A61K 39/001113; A61K 39/001124; C07K 2317/24; C07K 2317/622; C07K 2319/00; A61K 2039/5156; A61K 2039/5158; A61K 2039/70; A61K 38/00

(57) ABSTRACT

The invention provides compositions and methods for treating diseases associated with expression of CD19, e.g., by administering a recombinant T cell comprising the CD19 CAR as described herein, in combination with one or more B-cell inhibitors, e.g., inhibitors of one or more of CD10, CD20, CD22, CD34, CD123, FLT-3, ROR1, CD79b, CD179b, or CD79a. The disclosure additionally features novel antigen binding domains and CAR molecules directed to CD20 and CD22, and uses, e.g., as monotherapies or in combination therapies. The invention also provides kits and compositions described herein.

[0001] This application is a continuation of U.S. application Ser. No. 17/464,528, filed Sep. 1, 2021, which is a divisional of U.S. application Ser. No. 16/256,731, filed Jan. 24, 2019, now U.S. Pat. No. 11,149,076, which is a divisional of U.S. application Ser. No. 15/094,674, filed Apr. 8, 2016, now U.S. Pat. No. 10,253,086, which claims priority to U.S. Ser. No. 62/144,615, filed Apr. 8, 2015, U.S. Ser. No. 62/144,497, filed Apr. 8, 2015, U.S. Ser. No. 62/144,639, filed Apr. 8, 2015, U.S. Ser. No. 62/207,255, filed Aug. 19, 2015, U.S. Ser. No. 62/263,423, filed Dec. 4, 2015, the contents of each of which are incorporated herein by reference in their entireties.

### SEQUENCE LISTING

[0002] The instant application contains a Sequence Listing which has been submitted electronically in XML format and is hereby incorporated by reference in its entirety. Said XML copy, created on Feb. 8, 2023, is named N2067-707221 SL.txt and is 2,429,163 bytes in size.

### FIELD OF THE INVENTION

[0003] The present invention relates generally to the use of T cells engineered to express a Chimeric Antigen Receptor (CAR), optionally in combination with a B cell inhibitor, e.g., one or more inhibitors of CD10, CD19, CD20, CD22, CD34, CD123, FLT-3, ROR1, CD79b, CD179b, or CD79a to treat a disease associated with expression of the Cluster of Differentiation 19 protein (CD19).

### BACKGROUND OF THE INVENTION

[0004] Many patients with B cell malignancies are incurable with standard therapy. In addition, traditional treatment options often have serious side effects. Attempts have been made in cancer immunotherapy, however, several obstacles render this a very difficult goal to achieve clinical effectiveness. Although hundreds of so-called tumor antigens have been identified, these are generally derived from self and thus are poorly immunogenic. Furthermore, tumors use several mechanisms to render themselves hostile to the initiation and propagation of immune attack.

[0005] Recent developments using chimeric antigen receptor (CAR) modified autologous T cell (CART) therapy, which relies on redirecting T cells to a suitable cell-surface molecule on cancer cells such as B cell malignancies, show promising results in harnessing the power of the immune system to treat B cell malignancies and other cancers (see, e.g., Sadelain et al., Cancer Discovery 3:388-398 (2013)). The clinical results of the murine derived CART19 (i.e., “CTL019”) have shown promise in establishing complete remissions in patients suffering with CLL as well as in childhood ALL (see, e.g., Kalos et al., Sci Transl Med 3:95ra73 (2011), Porter et al., NEJM 365:725-733 (2011), Grupp et al., NEJM 368:1509-1518 (2013)). Besides the ability for the chimeric antigen receptor on the genetically modified T cells to recognize and destroy the targeted cells, a successful therapeutic T cell therapy needs to have the ability to proliferate and persist over time, in order to survey for leukemic relapse. The variable quality of T cells, resulting from anergy, suppression, or exhaustion, will have effects on CAR-transformed T cells' performance, over which skilled practitioners have limited control at this time. To be effective, CAR transformed patient T cells need to persist and maintain the ability to proliferate in response to the cognate antigen. It has been shown that ALL patient T cells perform can do this with CART19 comprising a murine scFv (see, e.g., Grupp et al., NEJM 368:1509-1518 (2013)).

### SUMMARY OF THE INVENTION

[0006] The disclosure features, at least in part, a method of treating a disorder associated with expression of the Cluster of Differentiation 19 protein (CD19) (e.g., OMIM Acc. No. 107265, Swiss Prot. Acc No. P15391). In certain embodiments, the disorder is a cancer, e.g., a hematological cancer. In some embodiments, the method comprises administering a Chimeric Antigen Receptor (CAR) molecule that binds CD19 in combination with a B-cell inhibitor, for example, one or more (e.g., one, two, three or more) B-cell inhibitors. In some embodiments, the B-cell inhibitor is chosen from an inhibitor of CD10, CD19, CD20, CD22, CD34, CD123, FLT-3, or ROR1, or a combination thereof. In some embodiments, the combination maintains or has better clinical effectiveness as compared to either therapy alone. In some embodiments, the methods herein involve the use of engineered cells, e.g., T cells, to express a CAR molecule that binds CD19, in combination with a B-cell inhibitor (e.g., an antibody (e.g., a mono- or bispecific antibody) to a second B target, e.g., CD10, CD19, CD20, CD22, CD34, CD123, FLT-3, or ROR1) or a CAR-expressing cell e.g., a CAR-expressing immune effector cell, that binds to the second B cell target, or a combination thereof) to treat the disorder associated with expression of CD19. The disclosure additionally features novel antigen binding domains and CAR molecules directed to CD20 and CD22, and uses, e.g., as monotherapies or in combination therapies.

[0007] Accordingly, in one aspect, the invention pertains to a method of treating a subject (e.g., a mammal) having a disease associated with expression of CD19. The method comprises administering to the subject a CD19 inhibitor, e.g., a CAR molecule that binds CD19 described herein, in combination with a B-cell inhibitor. For instance, the method comprises administering to the subject an effective number of one or more cells that express a CAR molecule that binds CD19, e.g., a CAR molecule that binds CD19 described herein (e.g., a wild-type or mutant CD19), in combination with a B-cell inhibitor. In certain embodiments, the B-cell inhibitor is chosen from a CD10 inhibitor, e.g., one or more CD10 inhibitors described herein; a CD20 inhibitor, e.g., one or more CD20 inhibitor described herein; a CD22 inhibitor, e.g., one or more CD22 inhibitors described herein; a CD34 inhibitor, e.g., one or more CD34 inhibitors described herein; a CD123 inhibitor, e.g., one or more CD123 inhibitor described herein; a FLT-3 inhibitor, e.g., one or more FLT-3 inhibitors described herein; an ROR1 inhibitor, e.g., one or more ROR1 inhibitor described herein; a CD79b inhibitor, e.g., one or more CD79b inhibitor described herein; a CD179b inhibitor, e.g., one or more CD179b inhibitor described herein; a CD79a inhibitor, e.g., one or more CD79a inhibitor described herein or any combination thereof. In certain aspects, a method of treating a subject having a B-cell leukemia or B-cell lymphoma, comprising administering to the subject an effective number of one or more cells that express a CAR molecule that binds CD19, in combination with one or more inhibitors of CD10, CD20, CD22, CD34, CD123, FLT-3, ROR1, CD79b, CD179b, or CD79a is disclosed.

[0008] In a related aspect, the present disclosure provides a method of reducing the proliferation of CD19-expressing cells, e.g., by administering to a subject, e.g., a patient in need thereof, a combination therapy as described herein, e.g., a CD19 inhibitor in combination with a B-cell inhibitor, e.g., one or more B-cell inhibitors as described herein. In another aspect, the present disclosure provides a method of selectively killing CD19-expressing cells, e.g., by administering to a subject, e.g., a patient in need thereof, a combination therapy as described herein, e.g., a CD19 inhibitor in combination with a B-cell inhibitor, e.g., one or more B-cell inhibitors as described herein. In certain aspects, the disclosure provides a method of providing an anti-tumor immunity in a subject, e.g., a mammal, comprising administering to the mammal an effective amount of a combination (e.g., one or more CAR-expressing cells) as described herein.

[0009] In an aspect, the disclosure provides a method of preventing a CD19-negative relapse in a mammal, comprising administering to the mammal one or more B-cell inhibitors, wherein the B-cell inhibitor comprises an inhibitor of one or more of CD10, CD20, CD22, CD34, CD123, FLT-3, ROR1, CD79b, CD179b, or CD79a.

[0010] In another aspect, the disclosure provides a method of treating a subject having a disease associated with expression of CD19, e.g., DLBCL (e.g. primary DLBCL). The method comprises administering to the subject an effective number of one or more cells that express a CAR molecule that binds CD19, e.g., a CD19 CAR, optionally in combination with a PD1 inhibitor. Optionally, the subject has, or is identified as having, at least 5%, 6%, 7%, 8%, 9%, 10%, 20%, 30%, 40%, 50%, 60%, 70%, 80%, or 90% of cancer cells, e.g., DLBCL cells, which are CD3+/PD1+.

[0011] In an aspect, the disclosure provides a method of treating a subject having a disease associated with expression of CD19, e.g., DLBCL. The method comprises administering to the subject an effective number of one or more cells that express a CAR molecule that binds CD19, e.g., a CD19 CAR, in combination with a PD-L1 inhibitor. Optionally, the subject has, or is identified as having, less than 20%, 10%, 9%, 8%, 7%, 6%, 5%, 4%, 3%, 2%, or 1% of cells in the cancer, e.g., cancer microenvironment, are double positive for CD19 and PD-L1.

[0012] In an aspect, the disclosure provides one or more B-cell inhibitors, wherein the B-cell inhibitor comprises an inhibitor of one or more of CD10, CD20, CD22, CD34, CD123, FLT-3, ROR1, CD79b, CD179b, or CD79a, for use in the treatment of a subject having a disease associated with expression of CD19, and wherein said subject has received, is receiving or is about to receive a cell that expresses a CAR molecule that binds CD19, e.g., a CD19 CAR.

### Timing and Dosage of the Combination Administration

[0013] The one or more therapies described herein can be administered to the subject substantially at the same time or in any order. For instance, a CD19 inhibitor, e.g., a CD19 CAR-expressing cell described herein, the one or more B-cell inhibitor, and/or optionally the at least one additional therapeutic agent can be administered simultaneously, in the same or in separate compositions, or sequentially.

[0014] For sequential administration, the CAR-expressing cell described herein (e.g., a CD19 CAR-expressing cell, a CD20 CAR-expressing cell, or a CD22 CAR-expressing cell) can be administered first, and the additional agent can be administered second, or the order of administration can be reversed. In some embodiments, the first therapy (e.g., a CAR-expressing cell such as a CD19 CART cell, CD20 CART cell, or CD22 CART cell) is continued when the second therapy is introduced, and in other embodiments the first therapy is withdrawn before, after, or at the same time as the second therapy is introduced. In instances of sequential administration, in some embodiments, the second therapy is initiated after a predetermined amount of time, or after the subject displays one or more indications that relapse has occurred or is likely to occur. The indication can be, e.g., the presence of cancer cells having a disturbance in the target of the first therapy, e.g., CD19, CD20, or CD22. The disturbance may be, e.g., a frameshift mutation and/or a premature stop codon.

[0015] In other embodiments, the two or more therapies (e.g., a CD19 CAR-expressing cell and a B-cell inhibitor) are administered simultaneously. Without being bound by theory, in some embodiments, simultaneous administration of the therapies can reduce the likelihood of relapse and/or delay relapse.

[0016] When administered in combination, the first therapy (e.g., CAR therapy, e.g., CAR-expressing cell directed against CD19, CD20, or CD22) and the additional agent (e.g., second or third agent, e.g., a B-cell inhibitor), or all, can be administered in an amount or dose that is higher, lower, or the same as the amount or dosage of each agent used individually, e.g., as a monotherapy. In certain embodiments, the administered amount or dosage of the first therapy, second therapy, optionally a third therapy, or all, is lower (e.g., at least 20%, at least 30%, at least 40%, or at least 50%) than the amount or dosage of each agent used individually, e.g., as a monotherapy. In other embodiments, the amount or dosage of the first therapy, second therapy, optionally a third therapy, or all, that results in a desired effect (e.g., treatment of cancer) is lower (e.g., at least 20%, at least 30%, at least 40%, or at least 50% lower) than the amount or dosage of each agent used individually, e.g., as a monotherapy, required to achieve the same therapeutic effect. In certain embodiments, the lower dose results in reduced side effects compared to those seen when the regular (monotherapy) dose is administered.

[0017] In an embodiment, the therapy comprises a population of cells. In embodiments, the cells are immune effector cells, e.g., CAR-expressing cells.

[0018] Alternatively, or in combination with the methods described herein, methods are disclosed that comprise a diagnostic step or a patient selection step, for instance as described below.

[0019] In one aspect, the invention provides a method of evaluating a subject, e.g., a patient, for relapser status (e.g. a relapser or a non-relapser after a CAR-therapy). In one embodiment, the method identifies a subject, e.g., a patient, who has relapsed (“relapser”) or who is are likely to relapse, or who has not relapsed (“non-relapser”) or who is likely not to relapse, after treatment with a CAR therapy (e.g., a CD19 CART therapy, e.g., described herein, e.g., a CTL019 therapy). In an embodiment, relapser status (e.g. relapser or non-relapser after a CART therapy) is determined by assaying for one or more characteristics of CD19.

[0020] In one embodiment, the one or more characteristics of CD19 include an alteration in a nucleic acid sequence (e.g., a mutation such as an insertion, a deletion, or a substitution, or a combination thereof), an alteration in a nucleic acid level, an alteration in a protein sequence, or an alteration in a protein level, or a combination thereof. In one embodiment, a relapser has one or more mutations in CD19, e.g., one or more mutations (e.g. insertions or deletions) in exon 2 of CD19. In an embodiment, a relapser has one or more mutations in exon 1, exon 2, exon 3, exon 4, exon 5, exon 6, or exon 7 of CD19. In an embodiment, the mutation produces a premature stop codon, e.g., by an insertion or deletion leading to a frameshift, e.g., in exon 2 of CD19. In an embodiment, the mutation is a mutation of Table 31.

[0021] In an embodiment, the characteristic of CD19 is compared to a reference characteristic. For example, when the characteristic is a sequence (e.g., protein or nucleic acid sequence from a biological sample), the reference characteristic can be a wild-type sequence (e.g., protein or nucleic acid sequence) of CD19. The characteristic may be the percent of cells in the sample having a mutant sequence. When the characteristic is a level (e.g., protein or nucleic acid level), the reference characteristic can be a wild-type level (e.g., protein or nucleic acid level) of CD19. The characteristic may be the level of protein or nucleic acid in the sample. The characteristic may be the percentage of cells in the sample that have a level of protein or nucleic acid that is above a given threshold.

[0022] In an embodiment, methods are provided for identifying a subject having cancer, e.g., a hematological cancer, such as, e.g., CLL or ALL, as being a relapser or non-relapser after a treatment that comprises a CAR therapy, e.g., a CD19 CART therapy. The method comprises: (1) acquiring a sample from the subject (e.g., an apheresis sample obtained from the blood of the subject; and/or e.g., a manufactured product sample, e.g., genetically engineered T cells obtained from the blood of the subject); (2) determining a characteristic of CD19, e.g., a sequence or level as described herein; and (3) (optionally) comparing the determined characteristic of CD19 to a reference characteristic; wherein the difference, e.g., statistically significant difference, between the determined characteristic compared to the reference characteristic is predictive of relapse to the CAR therapy; and (4) identifying the subject as a relapser or non-relapser to the CAR therapy, e.g., based on the determined characteristic of CD19. In one embodiment, the presence or absence of the characteristic of CD19 is the presence or absence of a premature stop codon, e.g., by an insertion or deletion leading to a frameshift. In an embodiment, the presence of the characteristic of CD19 is a mutation of Table 31.

[0023] In an embodiment, the provided methods comprise (1) acquiring a sample from the subject (e.g., an apheresis sample obtained from the blood of the subject; and/or, e.g., a manufactured product sample, e.g., genetically engineered T cells obtained from the blood of the subject, e.g., a manufactured CART19 product); (2) determining a characteristic of CD19, e.g., a sequence or level as described herein; and (3) (optionally) comparing the determined characteristic of CD19 to a reference characteristic; wherein the presence of the characteristic of CD19 (e.g., the difference, e.g., a statistically significant difference, between the determined characteristic compared to the reference characteristic) is predictive of relapse to the CAR therapy. In one embodiment, the presence of the characteristic of CD19 is the presence of a premature stop codon, e.g., by an insertion or deletion leading to a frameshift. In an embodiment, the presence of the characteristic of CD19 is a mutation of Table 31.

[0024] In an embodiment, methods are provided for determining the relapse of a subject having cancer, e.g., a hematological cancer such as CLL or ALL, after a treatment comprising a CAR therapy, e.g., a CD19 CAR therapy as described herein. The method comprises determining a characteristic of CD19 in a sample obtained prior to relapse. In an embodiment, the presence of the characteristic of CD19 (e.g., the difference, e.g., a statistically significant difference, between the determined characteristic compared to the reference characteristic) is indicative of relapse after CAR therapy. In one embodiment, the presence of the characteristic of CD19 is the presence of a premature stop codon, e.g., by an insertion or deletion leading to a frameshift. In an embodiment, the presence of the characteristic of CD19 is a mutation of Table 31.

[0025] In an embodiment, methods are provided for evaluating a subject having cancer, e.g., a hematological cancer such as CLL or ALL. The method comprises acquiring a value of relapser status for the subject that comprises a measure of one or characteristics of CD19, e.g., one or more of the characteristics of CD19 as described herein, thereby evaluating the subject.

[0026] In an embodiment, methods are provided for evaluating or monitoring the effectiveness of a CAR therapy, e.g., a CD19 CART therapy, in a subject having cancer comprising acquiring a value of relapser status for the subject that comprises a measure of one or more characteristic of CD19, e.g., one or more of the characteristics of CD19 as described herein, thereby evaluating or monitoring the effectiveness of the CAR therapy in the subject

[0027] In an embodiment, methods are provided for providing a prediction for success rate of a CAR therapy, e.g., a CD19 CART therapy, e.g., described herein, in a subject having cancer, said method comprising steps of providing a biological sample from the subject; determining one or more characteristic of CD19, e.g., one or more of the characteristics of CD19 as described herein; and based on the characteristic determined, providing a prognosis to the subject.

[0028] In some aspects, the present disclosure provides, e.g., a method of, or assay for, identifying a subject having cancer as having an increased or decreased likelihood to respond to a treatment that comprises a chimeric antigen receptor (CAR) therapy, the method comprising:
[0029] (1) acquiring a sample from the subject;
[0030] (2) determining a value for one or more of:
   [0031] (i) a level of one or more markers listed in Table 29 in the sample;
   [0032] (ii) a characteristic of CD19, e.g., a mutation, e.g., a mutation causing a frameshift or a premature stop codon or both, or
   [0033] (iii) a level or activity of T_{REG} cells; and
[0034] (3) (optionally) comparing the determined value, e.g., the level, activity or characteristic of (i), (ii) or (iii) or a combination thereof, to a reference value, wherein the difference, e.g., a statistically significant difference, between the determined value compared to the reference value, is predictive of the subject's responsiveness to the CAR therapy; and
[0035] (4) identifying the subject as a complete responder, partial responder or non-responder, or relapse or non-relapser to the CAR therapy based on the determined value.

[0036] In certain embodiments, any of the aforesaid methods can further include the following:
[0037] (i) administering to the subject a therapeutically effective dose of a CAR therapy, e.g., a therapy comprising a CD19-expressing cell, if no difference, e.g., no statistically significant difference, is detected in the value for one, two or more (all) of (i) the level or activity of one or more markers listed in Table 29; (ii) the characteristic of CD19, e.g., a mutation, e.g., a mutation causing a frameshift or a premature stop codon or both, or (iii) the level of T_{REG} cells in a biological sample;
[0038] (ii) administering to the subject a therapeutically effective dose of a CAR therapy, e.g., a therapy comprising a CD19-expressing cell and one or more B-cell inhibitor (e.g., one or more inhibitors of CD10, CD20, CD22, CD34, CD123, FLT-3, or ROR1 as described herein), if a difference, e.g., a statistically significant difference, is detected in the value for one, two or more (all) of (i) the level or activity of one or more markers listed in Table 29; (ii) the characteristic of CD19, e.g., a mutation, e.g., a mutation causing a frameshift or a premature stop codon or both, or (iii) the level of T_{REG} cells in a biological sample; or
[0039] (iii) discontinuing a first therapy, e.g., a therapy comprising a CD19-expressing cell, and administering a second therapy, e.g., one or more B-cell inhibitor (e.g., one or more inhibitors of CD10, CD20, CD22, CD34, CD123, FLT-3, or ROR1 as described herein), if a difference, e.g., a statistically significant difference, is detected in the value for one, two or more (or all) of (i) the level or activity of one or more markers listed in Table 29; (ii) the characteristic of CD19, e.g., a mutation, e.g., a mutation causing a frameshift or a premature stop codon or both, or (iii) the level of T_{REG} cells in a biological sample.

[0040] The administration steps (i)-(iii) can be performed before or after the patient evaluation steps, as described in exemplary embodiments below.

[0041] In certain aspects, a method for treating a subject having cancer is disclosed. The method comprises:
[0042] (a) acquiring, e.g., determining, if the subject has a value for one, two or more (all) of:
   [0043] (i) a level of one or more markers listed in Table 29;
   [0044] (ii) a characteristic of CD19, e.g., a mutation causing a frameshift or a premature stop codon or both, or
   [0045] (iii) a level or activity of T_{REG} cells in a biological sample, and
[0046] (b) responsive to said value, further include the following:
   [0047] (i) administering to the subject a therapeutically effective dose of a CAR therapy, e.g., a therapy comprising a CD19-expressing cell, if no difference, e.g., no statistically significant difference, is detected in one, two or more (or all) of (i) the level or activity of one or more markers listed in Table 29; (ii) the characteristic of CD19, e.g., a mutation, e.g., a mutation causing a frameshift or a premature stop codon or both, or (iii) the level of T_{REG} cells in a biological sample;
   [0048] (ii) administering to the subject a therapeutically effective dose of a CAR therapy, e.g., a therapy comprising a CD19-expressing cell and one or more B-cell inhibitor (e.g., one or more inhibitors of CD10, CD20, CD22, CD34, CD123, FLT-3, or ROR1 as described herein), if a difference, e.g., a statistically significant difference, is detected in one, two or more (or all) of (i) the level or activity of one or more markers listed in Table 29; (ii) the characteristic of CD19, e.g., a mutation, e.g., a mutation causing a frameshift or a premature stop codon or both, or (iii) the level of T_{REG} cells in a biological sample; or
   [0049] (iii) discontinuing a first therapy, e.g., a therapy comprising a CD19-expressing cell, and administering a second therapy, e.g., one or more B-cell inhibitor (e.g., one or more inhibitors of CD10, CD20, CD22, CD34, CD123, FLT-3, or ROR1 as described herein), if a difference, e.g., a statistically significant difference, is detected in one or more of (i) the level or activity of one or more markers listed in Table 29; (ii) the characteristic of CD19, e.g., a mutation, e.g., a mutation causing a frameshift or a premature stop codon or both, or (iii) the level of T_{REG} cells in a biological sample.

[0050] In another aspect, a method for treating a subject having cancer is provided. The method includes:
[0051] (a) administering to a subject a therapeutically effective dose of a CAR therapy, e.g., a therapy comprising a CD19-expressing cell,
[0052] (b) acquiring a value for (e.g., determining if the subject has), one, two or more (all) of:
   [0053] (I) a level of one or more markers listed in Table 29;
   [0054] (II) a characteristic of CD19, e.g., a mutation, e.g., a mutation causing a frameshift or a premature stop codon or both, or
   [0055] (III) a level or activity of T_{REG} cells in a biological sample, and
[0056] (c) in response to the value or determination in step (b) (I-III), performing one or more of the following:
   [0057] (i) administering to the subject a therapeutically effective dose of a CAR therapy, e.g., a therapy comprising a CD19-expressing cell, if no difference, e.g., no statistically significant difference, is detected in one or more of (I) the level or activity of one or more markers listed in Table 29; (II) the characteristic of CD19, e.g., a mutation, e.g., a mutation causing a frameshift or a premature stop codon or both, or (III) the level of T_{REG} cells in a biological sample;
   [0058] (ii) administering to the subject a therapeutically effective dose of a CAR therapy, e.g., a therapy comprising a CD19-expressing cell and one or more B-cell inhibitor (e.g., one or more inhibitors of CD10, CD20, CD22, CD34, CD123, FLT-3, or ROR1 as described herein), if a difference, e.g., a statistically significant difference, is detected in one or more of (I) the level or activity of one or more markers listed in Table 29; (II) the characteristic of CD19, e.g., a mutation, e.g., a mutation causing a frameshift or a premature stop codon or both, or (III) the level of T_{REG} cells in a biological sample; or
   [0059] (iii) discontinuing a first therapy, e.g., a therapy comprising a CD19-expressing cell, and administering a second therapy, e.g., one or more B-cell inhibitor (e.g., one or more inhibitors of CD10, CD20, CD22, CD34, CD123, FLT-3, or ROR1 as described herein), if a difference, e.g., a statistically significant difference, is detected in one or more of (I) the level or activity of one or more markers listed in Table 29; (II) the characteristic of CD19, e.g., a mutation, e.g., a mutation causing a frameshift or a premature stop codon or both, or (III) the level of T_{REG} cells in a biological sample.

[0060] In some embodiments of any of the aforesaid methods, the sample is a biological sample selected from a blood, plasma, or a serum sample. In a particular embodiment, a biological sample is a blood sample. In one embodiment, the sample is an apheresis sample, e.g., T cells obtained from the blood of the subject. In an embodiment, the sample is a manufactured product sample, e.g. genetically engineered T cells obtained from the blood of the subject, e.g., a manufactured CAR product, e.g., a manufactured CART19 product.

[0061] In an embodiment, the methods herein can be used to determine if a patient is likely to respond to CAR therapy (e.g., CD19 CART), e.g., if a patient who has not received CAR therapy is likely to respond to CAR therapy, or if a patient who has received CAR therapy is likely to respond to continued CAR therapy. In general, the same CD19 characteristics that predict relapse predict that a patient is less likely to respond to a CD19 CAR therapy. A patient who is identified as less likely to respond to a CD19 CAR therapy can be administered a different type of therapy, such as B-cell inhibitor (e.g., one or more inhibitors of CD10, CD20, CD22, CD34, CD123, FLT-3, ROR1, CD79b, CD179b, or CD79a as described herein).

[0062] In another aspect, a method for treating a subject having cancer, e.g., a hematological cancer, is provided. In an embodiment, the method includes determining if a subject has a difference, e.g., statistically significant difference, in a characteristic of CD19 relative to a reference characteristic, and if there is a difference, e.g., statistically significant difference between the determined characteristic and reference characteristic, administering to the subject a therapeutically effective dose of a CAR therapy, e.g., CART, thereby treating the subject. In an embodiment, the characteristic is CD19 sequence, e.g., protein or nucleic acid sequence. In an embodiment, the method comprises assaying for the presence or absence of frameshifted CD19, e.g., CD19 comprising a premature stop codon.

[0063] In embodiments of any of the aforesaid methods, the treatment comprises administering a CD19 CAR-expressing cell, optionally in combination with one or more B-cell inhibitors. In an embodiment, the CD19 CAR therapy is administered simultaneously with one or more B-cell inhibitors (e.g., one or more inhibitors of CD10, CD20, CD22, CD34, CD123, FLT-3, ROR1, CD79b, CD179b, or CD79a as described herein). In an embodiment, the CD19 CAR therapy is administered before the one or more of B-cell inhibitors. In an embodiment, the CD19 CAR therapy is administered after the one or more of B-cell inhibitors.

[0064] In an embodiment, wherein there is a difference between the determined characteristic and reference characteristic, the method comprises modifying the CAR product prior to infusion into the subject. In an embodiment, wherein there is a different between the determined characteristic and the reference characteristic, the method comprises modifying the manufacture of a CAR product prior to infusion into the subject. In an embodiment, if there is a difference between the determined characteristic and reference characteristic the method comprises adjusting the CAR infusion dose to achieve an anticancer effect.

[0065] In an embodiment, the methods of treatment comprise determining if a subject has an increased likelihood to respond to a CAR therapy, e.g., a CD19 CART therapy, e.g., a CD19 CART therapy described herein, by comparing a characteristic of CD19 in a sample from the subject relative to a reference characteristic, wherein a difference in the characteristic relative to the reference characteristic is indicative of an increased likelihood of response; and administering to the subject a therapeutically effective dose of a CAR therapy, thereby treating the subject.

[0066] In an embodiment, the methods of treatment comprise obtaining a sample from a subject; determining a characteristic of CD19 (e.g., the presence or absence of a frameshift or premature stop codon), relative to a reference characteristic; and administering a therapeutically effective dose of a CAR expressing cell, if the subject is identified as having a statistically significant difference between the CD19 characteristic of the sample and a reference characteristic in the sample.

[0067] The CD19 characteristic can be used to design a treatment for the patient. For example, in an embodiment, when a patient sample comprises wild-type CD19, the patient is administered a CD19 inhibitor, e.g., a CD19 CAR-expressing cell, e.g., a CD19 CART. In an embodiment, when a patient sample comprises mutant CD19, e.g., frameshifted CD19, e.g., CD19 comprising a premature stop codon, the patient is administered a therapy other than a CD19 inhibitor, e.g., the patient is administered another B-cell inhibitor. In an embodiment, when a patient sample comprises at least normal levels of CD19, the patient is administered a CD19 inhibitor, e.g., a CD19 CAR-expressing cell, e.g., a CD19 CART. In an embodiment, when a patient sample comprises lower than normal levels of CD19, the patient is administered a therapy other than a CD19 inhibitor, e.g., the patient is administered another B-cell inhibitor (e.g., one or more inhibitors of CD10, CD20, CD22, CD34, CD123, FLT-3, ROR1, CD79b, CD179b, or CD79a as described herein).

[0068] In an embodiment, the methods of treatment comprise acquiring a value of relapser status for the subject that comprises a measure of a CD19 characteristic, and responsive to a determination of relapser status, performing one, two, three four or more of: (1) identifying the subject as a relapse or non-relapser; (2) administering a CAR therapy; (3) selecting or altering a dosing of a CAR therapy; (4) selecting or altering the schedule or time course of a CAR therapy; (5) administering, e.g., to a relapser, an additional agent in combination with the CAR therapy, e.g., administering one or more B-cell inhibitors; or a checkpoint inhibitor, e.g., a checkpoint inhibitor described herein, or a kinase inhibitor, e.g., a kinase inhibitor described herein; (6) administering to a relapser a therapy that increases the number of naïve T cells in the subject prior to treatment with a CAR therapy; modifying a manufacturing process of a CAR therapy, e.g., enrich for naïve T cells prior to introducing a nucleic acid encoding a CAR, e.g., for a subject identified as a relapser; or (7) selecting an alternative therapy, e.g., a standard of care for a particular cancer (e.g., as described herein), e.g., for a relapser; thereby treating cancer in the subject.

[0069] In some embodiments, the method comprises administering one, two, three or more B-cell inhibitors (e.g., one or more inhibitors of CD10, CD20, CD22, CD34, CD123, FLT-3, or ROR1 as described herein). For instance, in an embodiment, the method includes administering a CD19 inhibitor, e.g., a cell expressing a CD19 CAR, in combination with a CD10 inhibitor, or any combination of a CD10 inhibitor and an inhibitor of CD20, CD22, CD34, CD123, FLT-3, or ROR1 as described herein. In another embodiment, the method includes administering a CD19 inhibitor, e.g., a cell expressing a CD19 CAR, in combination with a CD20 inhibitor, or any combination of a CD20 inhibitor and an inhibitor of CD10, CD22, CD34, CD123, FLT-3, or ROR1 as described herein. In another embodiment, the method includes administering a CD19 inhibitor, e.g., a cell expressing a CD19 CAR, in combination with a CD22 inhibitor, or any combination of a CD22 inhibitor and an inhibitor of CD10, CD20, CD34, CD123, FLT-3, or ROR1 as described herein. In another embodiment, the method includes administering a CD19 inhibitor, e.g., a cell expressing a CD19 CAR, in combination with a CD34 inhibitor, or any combination of a CD34 inhibitor and an inhibitor of CD10, CD20, CD22, CD123, FLT-3, or ROR1 as described herein. In another embodiment, the method includes administering a CD19 inhibitor, e.g., a cell expressing a CD19 CAR in combination with a CD123 inhibitor, or any combination of a CD123 inhibitor and an inhibitor of CD10, CD20, CD34, CD22, FLT-3, or ROR1 as described herein. In another embodiment, the method includes administering a CD19 inhibitor, e.g., a cell expressing a CD19 CAR, in combination with a FLT-3 inhibitor, or any combination of a FLT-3 inhibitor and an inhibitor of CD10, CD20, CD34, CD123, or ROR1 as described herein. In another embodiment, the method includes administering a CD19 inhibitor, e.g., a cell expressing a CD19 CAR, in combination with a ROR1 inhibitor, or any combination of a ROR1 inhibitor and an inhibitor of CD10, CD20, CD34, CD123, or FLT-3, as described herein. In some embodiments, the method comprises administering one, two, three or more B-cell inhibitors (e.g., one or more inhibitors of CD10, CD20, CD22, CD34, CD123, FLT-3, or ROR1, CD79b, CD179b, or CD79a as described herein).

[0070] In some embodiments, the methods of treatment described herein further comprise one or both of: determining a level of an immune checkpoint molecule (e.g., PD-L1, PD1, LAG3, or TIM3) in a patient sample; and administering an immune checkpoint inhibitor (e.g., an inhibitor of one or more of PD-L1, PD1, LAG3, and TIM3) to the patient. For example, the method can comprise treating a patient with one or more CAR-expressing cells described herein (e.g., CD19 CAR in combination with a B-cell inhibitor, CD20 CAR, or CD22 CAR) and determining the level of an immune checkpoint molecule in the patient before or after the treatment. In some embodiments, the method comprises administering the immune checkpoint inhibitor to a patient that has elevated levels of the immune checkpoint molecule compared to a reference level, e.g., administering a PD-L1 inhibitor in response to elevated PD-L1 levels, administering a PD1 inhibitor in response to elevated PD1 levels, administering a LAG3 inhibitor in response to elevated LAG3 levels, or administering a TIM3 inhibitor in response to elevated TIM3 levels. In some embodiments, the method comprises administering an immune checkpoint inhibitor to a patient who has received, is receiving, or is about to receive therapy with one or more CAR-expressing cells described herein (e.g., CD19 CAR in combination with a B-cell inhibitor, CD20 CAR, or CD22 CAR), wherein the patient has, or is identified as having, elevated levels of the immune checkpoint molecule compared to a reference level.

### Compositions

[0071] In some aspects, the present disclosure provides, e.g., a composition comprising: (i) one or more cells that express a CAR molecule that binds CD19, e.g., a CAR molecule that binds CD19 described herein, e.g., a CD19 CAR, and (ii) a B-cell inhibitor, e.g., one or more inhibitors of CD10, CD20, CD22, CD34, CD123, FLT-3, or ROR1. In embodiments, (i) and (ii) are provided separately, and in embodiments, (i) and (ii) are admixed.

[0072] In some aspects, the present disclosure provides, e.g., a nucleic acid encoding: (i) a CAR molecule that binds CD19, e.g., a CAR molecule that binds CD19 described herein, e.g., a CD19 CAR, and (ii) one or more B-cell inhibitors, e.g., inhibitors of one or more of CD10, CD20, CD22, CD34, CD123, FLT-3, or ROR1. In some aspects, the present disclosure provides, e.g., a nucleic acid encoding: (i) a CAR molecule that binds CD19, e.g., a CAR molecule that binds CD19 described herein, e.g., a CD19 CAR, and (ii) a CAR molecule that binds a B-cell antigen, e.g., one or more of CD10, CD20, CD22, CD34, CD123, FLT-3, or ROR1. In embodiments, the nucleic acid comprises RNA or DNA.

[0073] In some aspects, the present disclosure provides, e.g., a nucleic acid encoding: (i) a CAR molecule that binds CD19, e.g., a CAR molecule that binds CD19 described herein, e.g., a CD19 CAR, and (ii) a CAR molecule that binds a B-cell antigen, e.g., one or more of CD10, CD20, CD22, CD34, CD123, FLT-3, ROR1, CD79b, CD179b, or CD79a. In embodiments, the nucleic acid comprises RNA or DNA. In embodiments, the nucleic acid sequences encoding (i) and (ii) are situated in the same orientation, e.g., transcription of the nucleic acid sequences encoding (i) and (ii) proceeds in the same direction. In embodiments, the nucleic acid sequences encoding (i) and (ii) are situated in different orientations. In embodiments, a single promoter controls expression of the nucleic acid sequences encoding (i) and (ii). In embodiments, a nucleic acid encoding a protease cleavage site (such as a T2A, P2A, E2A, or F2A cleavage site) is situated between the nucleic acid sequences encoding (i) and (ii). In embodiments, the protease cleavage site is placed such that a cell can express a fusion protein comprising (i) and (ii), which protein is subsequently processed into two peptides by proteolytic cleavage. In some embodiments, the nucleic acid sequences encoding (i) is upstream of the nucleic acid sequences encoding (ii), or the nucleic acid sequences encoding (ii) is upstream of the nucleic acid sequences encoding (i). In embodiments, a first promoter controls expression of the nucleic acid sequence encoding (i) and a second promoter controls expression of the nucleic acid sequence encoding (ii). In embodiments, the nucleic acid is a plasmid. In embodiments, the nucleic acid comprises a viral packaging element. In some aspects, the present disclosure provides a cell, e.g., an immune effector cell, comprising the nucleic acid described herein, e.g., a nucleic acid comprising (i) and (ii) as described above. The cell may comprise a protease (e.g., endogenous or exogenous) that cleaves a T2A, P2A, E2A, or F2A cleavage site.

[0074] In some aspects, the present disclosure provides, e.g., a composition comprising: (i) a first nucleic acid encoding a CAR molecule that binds CD19, e.g., a CAR molecule that binds CD19 described herein, e.g., a CD19 CAR, and (ii) a second nucleic acid encoding one or more B-cell inhibitors, e.g., inhibitors of one or more of CD10, CD20, CD22, CD34, CD123, FLT-3, or ROR1. In some aspects, the present disclosure provides, e.g., a composition comprising: (i) a first nucleic acid encoding a CAR molecule that binds CD19, e.g., a CAR molecule that binds CD19 described herein, e.g., a CD19 CAR, and (ii) a CAR molecule that binds a B-cell antigen, e.g., one or more of CD10, CD20, CD22, CD34, CD123, FLT-3, or ROR1. In embodiments, the first nucleic acid and second nucleic acid each comprises RNA or DNA.

[0075] In some aspects, the present disclosure provides, e.g., a vector comprising a nucleic acid or nucleic acids as described herein. The present disclosure also provides, in certain aspects, a cell comprising a vector or nucleic acid as described herein.

[0076] This disclosure also provides, in certain aspects, a composition comprising one or more immune effector cells and: (i) a first nucleic acid encoding, or a first polypeptide comprising, a CAR molecule that binds CD19, e.g., a CAR molecule that binds CD19 described herein, e.g., a CD19 CAR, and (ii) a second nucleic acid encoding, or a second polypeptide comprising, a CAR molecule that binds a B-cell antigen, e.g., one or more of CD10, CD20, CD22, CD34, CD123, FLT-3, ROR1, CD79b, CD179b, or CD79a. In embodiments, the first nucleic acid or first polypeptide and the second nucleic acid or second polypeptide are each contained within, e.g., expressed by, a first immune effector cell. In embodiments, the composition comprises a first immune effector cell containing e.g., expressing the first nucleic acid or first polypeptide and a second immune effector cell containing e.g., expressing the second nucleic acid or second polypeptide. In embodiments, the composition does not comprise a cell containing, e.g., expressing, both of the first nucleic acid or first polypeptide and the second nucleic acid or second polypeptide.

[0077] Manufacturing

[0078] In certain aspects, the disclosure provides a method of making a cell, comprising transducing an immune effector cell, e.g., a T cell or NK cell, with a vector as described herein, e.g., a vector encoding a CAR. In certain aspects, the disclosure provides a method of making a cell, comprising introducing a nucleic acid as described herein (e.g., a nucleic acid encoding a CAR) into an immune effector cell, e.g., a T cell or NK cell. In certain aspects, the disclosure provides a method of generating a population of RNA-engineered cells comprising introducing an in vitro transcribed RNA or synthetic RNA into a cell, where the RNA comprises a nucleic acid as described herein, e.g., a nucleic acid encoding a CAR.

[0079] In some embodiments, the methods of making disclosed herein further comprise contacting the population of cells, (e.g., CD19 CAR-expressing cells, CD20 CAR-expressing cells, CD22 CAR-expressing cells, B-cell inhibitor cells, or both of CD19 CAR-expressing cells and B-cell inhibitor cells), with a nucleic acid encoding a telomerase subunit, e.g., hTERT. The nucleic acid encoding the telomerase subunit can be DNA.

[0080] In some embodiments, the method of making disclosed herein further comprises culturing the population of cells, (e.g., CD19 CAR-expressing cells, CD20 CAR-expressing cells, CD22 CAR-expressing cells, B-cell inhibitor cells, or both of CD19 CAR-expressing cells and B-cell inhibitor cells), in serum comprising 2% hAB serum.

### Indications

[0081] In one embodiment, the disease associated with CD19 expression is selected from a proliferative disease such as a cancer or malignancy or a precancerous condition such as a myelodysplasia, a myelodysplastic syndrome or a preleukemia, or is a non-cancer related indication associated with expression of CD19. In one embodiment, the disease is a solid or a liquid tumor. In one embodiment, the cancer is a pancreatic cancer. In one embodiment, the disease is a hematologic cancer. In one embodiment, the hematologic cancer is a leukemia. In one embodiment, the cancer is selected from the group consisting of one or more acute leukemias including but not limited to B-cell acute lymphoid leukemia (BALL), T-cell acute lymphoid leukemia (TALL), small lymphocytic leukemia (SLL), acute lymphoid leukemia (ALL) (e.g., relapsing and refractory ALL); one or more chronic leukemias including but not limited to chronic myelogenous leukemia (CIVIL), and chronic lymphocytic leukemia (CLL). Additional hematologic cancers or conditions include, but are not limited to mantle cell lymphoma (MCL), B cell prolymphocytic leukemia, blastic plasmacytoid dendritic cell neoplasm, Burkitt's lymphoma, diffuse large B cell lymphoma, follicular lymphoma, hairy cell leukemia, small cell- or a large cell-follicular lymphoma, malignant lymphoproliferative conditions, MALT lymphoma, Marginal zone lymphoma, multiple myeloma, myelodysplasia and myelodysplastic syndrome, non-Hodgkin lymphoma, Hodgkin lymphoma, plasmablastic lymphoma, plasmacytoid dendritic cell neoplasm, Waldenstrom macroglobulinemia, and “preleukemia.” Preleukemia encompasses a diverse collection of hematological conditions united by ineffective production (or dysplasia) of myeloid blood cells In embodiments, a disease associated with CD19 expression include, but not limited to atypical and/or non-classical cancers, malignancies, precancerous conditions or proliferative diseases expressing CD19; and any combination thereof.

[0082] In one embodiment, the disease associated with expression of CD19 is a lymphoma, e.g., MCL or Hodgkin lymphoma. In one embodiment, the disease associated with expression of CD19 is leukemia, e.g., SLL, CLL and/or ALL.

[0083] In one embodiment, the disease associated with a tumor antigen, e.g., a tumor antigen described herein, is selected from a proliferative disease such as a cancer or malignancy or a precancerous condition such as a myelodysplasia, a myelodysplastic syndrome or a preleukemia, or is a non-cancer related indication associated with expression of a tumor antigen described herein. In an embodiment, the disease associated with a tumor antigen described herein is a solid tumor, e.g., a solid tumor described herein, e.g., prostatic, colorectal, pancreatic, cervical, gastric, ovarian, head, or lung cancer.

[0084] In an embodiment, the cancer is chosen from AML, ALL, B-ALL, T-ALL, B-cell prolymphocytic leukemia, chronic lymphocytic leukemia, CIVIL, hairy cell leukemia, Hodgkin lymphoma, mast cell disorder, myelodysplastic syndrome, myeloproliferative neoplasm, plasma cell myeloma, plasmacytoid dendritic cell neoplasm, or a combination thereof.

[0085] In an embodiment, the subject (e.g., a subject to be treated with a CD19 CAR, optionally in combination with a second agent such as a PD1 inhibitor or PD-L1 inhibitor) has, or is identified as having, at least 5%, 6%, 7%, 8%, 9%, 10%, 20%, 30%, 40%, 50%, 60%, 70%, 80%, or 90% of cancer cells, e.g., DLBCL cells, which are CD3+/PD1+.

[0086] In an embodiment, the subject has relapsed or is identified as having relapsed after treatment with the one or more cells that express a CAR molecule that binds CD19, e.g., a CD19 CAR. In an embodiment, the subject has relapsed or is identified as having relapsed based on one or more of reappearance of blasts in the blood, bone marrow (>5%), or any extramedullary site, after a complete response. In an embodiment, the subject has relapsed or is identified as having relapsed based on detection of CD19-blasts above a predetermined threshold, e.g., over 1%, 2%, 3%, 4%, 5%, or 10%.

### Car Therapies

[0087] In certain embodiments, the method of treatment comprises a CAR therapy, e.g., administration of one or more cells that express one or more CAR molecules. A cell expressing one or more CAR molecules can be an immune effector cell, e.g., a T cell or NK cell. In an embodiment, the subject is a human.

[0088] In one embodiment, the cell expressing the CAR molecule comprises a vector that includes a nucleic acid sequence encoding the CAR molecule. In one embodiment, the vector is selected from the group consisting of a DNA, an RNA, a plasmid, a lentivirus vector, adenoviral vector, or a retrovirus vector. In one embodiment, the vector is a lentivirus vector. In one embodiment, the vector further comprises a promoter. In one embodiment, the promoter is an EF-1 promoter. In one embodiment, the EF-1 promoter comprises a sequence of SEQ ID NO: 100. In one embodiment, the vector is an in vitro transcribed vector, e.g., a vector that transcribes RNA of a nucleic acid molecule described herein. In one embodiment, the nucleic acid sequence in the in vitro vector further comprises a poly(A) tail, e.g., a poly A tail described herein, e.g., comprising about 150 adenosine bases. In one embodiment, the nucleic acid sequence in the in vitro vector further comprises a 3′UTR, e.g., a 3′ UTR described herein, e.g., comprising at least one repeat of a 3′UTR derived from human beta-globulin. In one embodiment, the nucleic acid sequence in the in vitro vector further comprises promoter. In one embodiment, the nucleic acid sequence comprises a T2A sequence.

[0089] In one embodiment, the cell expressing the CAR molecule is a cell described herein, e.g., a human T cell or a human NK cell, e.g., a human T cell described herein or a human NK cell described herein. In one embodiment, the human T cell is a CD8+ T cell. In one embodiment, the human T cell is a CD4+ T cell. In one embodiment, the human T cell is a CD4+/CD8+ T cell. In one embodiment the human T cell is a mixture of CD8+ and CD4+ T cells. In one embodiment, the cell is an autologous T cell. In one embodiment, the cell is an allogeneic T cell. In one embodiment, the cell is a T cell and the T cell is diacylglycerol kinase (DGK) deficient. In one embodiment, the cell is a T cell and the T cell is Ikaros deficient. In one embodiment, the cell is a T cell and the T cell is both DGK and Ikaros deficient.

[0090] In another embodiment, the cell expressing the CAR molecule, e.g., as described herein, can further express another agent, e.g., an agent which enhances the activity of a CAR-expressing cell.

[0091] In one embodiment, the method includes administering a cell expressing the CAR molecule, as described herein, in combination with an agent which enhances the activity of a CAR-expressing cell, wherein the agent is a cytokine, e.g., IL-7, IL-15, IL-21, or a combination thereof. The cytokine can be delivered in combination with, e.g., simultaneously or shortly after, administration of the CAR-expressing cell. Alternatively, the cytokine can be delivered after a prolonged period of time after administration of the CAR-expressing cell, e.g., after assessment of the subject's response to the CAR-expressing cell.

[0092] For example, in one embodiment, the agent that enhances the activity of a CAR-expressing cell can be an agent which inhibits an immune inhibitory molecule. Examples of immune inhibitory molecules include PD1, PD-L1, CTLA4, TIM3, CEACAM (e.g., CEACAM-1, CEACAM-3 and/or CEACAM-5), LAG3, VISTA, BTLA, TIGIT, LAIR1, CD160, 2B4 and TGFR beta. In one embodiment, the agent that inhibits an immune inhibitory molecule comprises a first polypeptide, e.g., an inhibitory molecule, associated with a second polypeptide that provides a positive signal to the cell, e.g., an intracellular signaling domain described herein. In one embodiment, the agent comprises a first polypeptide, e.g., of an immune inhibitory molecule such as PD1, PD-L1, CTLA4, TIM3, CEACAM (e.g., CEACAM-1, CEACAM-3 and/or CEACAM-5), LAG3, VISTA, BTLA, TIGIT, LAIR1, CD160, 2B4 or TGFR beta, or a fragment of any of these (e.g., at least a portion of the extracellular domain of any of these), and a second polypeptide which is an intracellular signaling domain described herein (e.g., comprising a costimulatory domain (e.g., 41BB, CD27 or CD28, e.g., as described herein) and/or a primary signaling domain (e.g., a CD3 zeta signaling domain described herein). In one embodiment, the agent comprises a first polypeptide of PD1 or a fragment thereof (e.g., at least a portion of the extracellular domain of PD1), and a second polypeptide of an intracellular signaling domain described herein (e.g., a CD28 signaling domain described herein and/or a CD3 zeta signaling domain described herein).

[0093] In one embodiment, lymphocyte infusion, for example allogeneic lymphocyte infusion, is used in the treatment of the cancer, wherein the lymphocyte infusion comprises at least one CD19 CAR-expressing cell described herein and optionally at least one cell expressing a CAR directed against a B-cell antigen. In one embodiment, autologous lymphocyte infusion is used in the treatment of the cancer, wherein the autologous lymphocyte infusion comprises at least one CD19-expressing cell and optionally at least one cell expressing a CAR directed against a B-cell antigen.

[0094] In one embodiment, the CAR expressing cell, e.g., T cell, is administered to a subject that has received a previous stem cell transplantation, e.g., autologous stem cell transplantation, or a subject that has received a previous dose of melphalan.

[0095] In one embodiment, the cell expressing the CAR molecule, e.g., a CAR molecule described herein, is administered in combination with an agent that ameliorates one or more side effect associated with administration of a cell expressing a CAR molecule or with administration of the B-cell inhibitor, e.g., an agent described herein.

[0096] In one embodiment, the cell expressing the CAR molecule, e.g., a CD19 CAR molecule described herein, and the B-cell inhibitor are administered in combination with an additional agent that treats the disease associated with CD19, e.g., an additional agent described herein.

[0097] In one embodiment, the cells expressing a CAR molecule, e.g., a CAR molecule described herein, are administered at a dose and/or dosing schedule described herein.

[0098] In one embodiment, the CAR molecule is introduced into T cells, e.g., using in vitro transcription, and the subject (e.g., human) receives an initial administration of cells comprising a CAR molecule, and one or more subsequent administrations of cells comprising a CAR molecule, wherein the one or more subsequent administrations are administered less than 15 days, e.g., 14, 13, 12, 11, 10, 9, 8, 7, 6, 5, 4, 3, or 2 days after the previous administration. In one embodiment, more than one administration of cells comprising a CAR molecule are administered to the subject (e.g., human) per week, e.g., 2, 3, or 4 administrations of cells comprising a CAR molecule are administered per week. In one embodiment, the subject (e.g., human subject) receives more than one administration of cells comprising a CAR molecule per week (e.g., 2, 3 or 4 administrations per week) (also referred to herein as a cycle), followed by a week of no administration of cells comprising a CAR molecule, and then one or more additional administration of cells comprising a CAR molecule (e.g., more than one administration of the cells comprising a CAR molecule per week) is administered to the subject. In another embodiment, the subject (e.g., human subject) receives more than one cycle of cells comprising a CAR molecule, and the time between each cycle is less than 10, 9, 8, 7, 6, 5, 4, or 3 days. In one embodiment, the cells comprising a CAR molecule are administered every other day for 3 administrations per week. In one embodiment, the cells comprising a CAR molecule are administered for at least two, three, four, five, six, seven, eight or more weeks.

[0099] In one embodiment, the therapy described herein (e.g., a CD20 CAR therapy, a CD22 CAR therapy, or a combination of the B-cell inhibitor and the cells expressing a CD19 CAR molecule, e.g., a CD19 CAR molecule described herein) are administered as a first line treatment for the disease, e.g., the cancer, e.g., the cancer described herein. In another embodiment, the therapy described herein (e.g., a CD20 CAR therapy, a CD22 CAR therapy, or a combination of the B-cell inhibitor and the cells expressing a CD19 CAR molecule, e.g., a CD19 CAR molecule described herein) are administered as a second, third, fourth line treatment for the disease, e.g., the cancer, e.g., the cancer described herein.

[0100] In one embodiment, a population of cells described herein is administered. In some embodiments the population of cells is isolated or purified.

[0101] In one embodiment, the method includes administering a population of cells, a plurality of which comprise a CAR molecule described herein. In some embodiments, the population of CAR-expressing cells comprises a mixture of cells expressing different CARs. For example, in one embodiment, the population of CAR-expressing cells can include a first cell expressing a CAR having an anti-CD19 binding domain described herein, and a second cell expressing a CAR having a different B-cell antigen binding domain. In embodiments, the first and second cell populations are T cells. In embodiments, the first and second populations of T cells are the same isotype, e.g., are both CD4+ T cells, or are both CD8+ T cells. In other embodiments, the first and second populations of T cells are different isotypes, e.g., the first population comprises CD4+ T cells and the second population comprises CD8+ T cells. In embodiments, the first and second populations of T cells are cell types described in WO2012/129514, which is herein incorporated by reference in its entirety. As another example, a population of cells can comprise a single cell type that expresses both a CAR having an anti-CD19 binding domain described herein and a CAR having a different B-cell antigen binding domain. As another example, a population of cells can comprise a single cell type that expresses a CAR having two or more (e.g., 2, 3, 4, or 5) B-cell antigen binding domains, e.g., is a bispecific CAR, e.g., as described herein. As another example, the population of CAR-expressing cells can include a first cell expressing a CAR that includes an anti-CD19 binding domain, e.g., as described herein, and a second cell expressing a CAR that includes an antigen binding domain to a target other than CD19 (e.g., CD10, CD20, CD22, CD34, CD123, FLT-3, ROR1, CD79b, CD179b, CD79a, or mesothelin). In one embodiment, the population of CAR-expressing cells includes, e.g., a first cell expressing a CAR that includes a primary intracellular signaling domain, and a second cell expressing a CAR that includes a secondary signaling domain. In one embodiment, the population of CAR-expressing cells includes, e.g., a first cell expressing a CAR that includes a first secondary signaling domain, and a second cell expressing a CAR that includes a secondary signaling domain different from the first secondary signaling domain.

[0102] As an example, when the first B-cell inhibitor is a CD19 CAR-expressing cell and the second B-cell inhibitor is a CD10 CAR-expressing cell, the first CAR and second CAR may be expressed by the same cell type or different types. For instance, in some embodiments, the cell expressing a CD19 CAR is a CD4+ T cell and the cell expressing a CD10 CAR is a CD8+ T cell, or the cell expressing a CD19 CAR is a CD8+ T cell and the cell expressing a CD10 CAR is a CD4+ T cell. In other embodiments, the cell expressing a CD19 CAR is a T cell and the cell expressing a CD10 CAR is a NK cell, or the cell expressing a CD19 CAR is a NK cell and the cell expressing a CD10 CAR is a T cell. In other embodiments, the cell expressing a CD19 CAR and the cell expressing a CD10 CAR are both NK cells or are both T cells, e.g., are both CD4+ T cells, or are both CD8+ T cells. In yet other embodiments, a single cell expresses the CD19 CAR and CD10 CAR, and this cell is, e.g., a NK cell or a T cell such as a CD4+ T cell or CD8+ T cell. The first CAR and second CAR can comprise the same or different intracellular signaling domains. For instance, in some embodiments the CD19 CAR comprises a CD3 zeta signaling domain and the CD10 CAR comprises a costimulatory domain, e.g., a 41BB, CD27 or CD28 costimulatory domain, while in some embodiments, the CD19 CAR comprises a costimulatory domain, e.g., a 41BB, CD27 or CD28 costimulatory domain and the CD10 CAR comprises a CD3 zeta signaling domain. In other embodiments, each of the CD19 CAR and the CD10 CAR comprises the same type of primary signaling domain, e.g., a CD3 zeta signaling domain, but the CD19 CAR and the CD10 CAR comprise different costimulatory domains, e.g., (1) the CD19 CAR comprises a 41BB costimulatory domain and the CD10 CAR comprises a different costimulatory domain e.g., a CD27 costimulatory domain, (2) the CD19 CAR comprises a CD27 costimulatory domain and the CD10 CAR comprises a different costimulatory domain e.g., a 41BB costimulatory domain, (3) the CD19 CAR comprises a 41BB costimulatory domain and the CD10 CAR comprises a CD28 costimulatory domain, (4) the CD19 CAR comprises a CD28 costimulatory domain and the CD10 CAR comprises a different costimulatory domain e.g., a 41BB costimulatory domain, (5) the CD19 CAR comprises a CD27 costimulatory domain and the CD10 CAR comprises a CD28 costimulatory domain, or (6) the CD19 CAR comprises a CD28 costimulatory domain and the CD10 CAR comprises a CD27 costimulatory domain. In another embodiment, a cell comprises a CAR that comprises both a CD19 antigen-binding domain and a CD10 antigen-binding domain, e.g., a bispecific antibody.

[0103] As another example, when the first B-cell inhibitor is a CD19 CAR-expressing cell and the second B-cell inhibitor is a CD20 CAR-expressing cell, the first CAR and second CAR may be expressed by the same cell type or different types. For instance, in some embodiments, the cell expressing a CD19 CAR is a CD4+ T cell and the cell expressing a CD20 CAR is a CD8+ T cell, or the cell expressing a CD19 CAR is a CD8+ T cell and the cell expressing a CD20 CAR is a CD4+ T cell. In other embodiments, the cell expressing a CD19 CAR is a T cell and the cell expressing a CD20 CAR is a NK cell, or the cell expressing a CD19 CAR is a NK cell and the cell expressing a CD20 CAR is a T cell. In other embodiments, the cell expressing a CD19 CAR and the cell expressing a CD20 CAR are both NK cells or are both T cells, e.g., are both CD4+ T cells, or are both CD8+ T cells. In yet other embodiments, a single cell expresses the CD19 CAR and CD20 CAR, and this cell is, e.g., a NK cell or a T cell such as a CD4+ T cell or CD8+ T cell. The first CAR and second CAR can comprise the same or different intracellular signaling domains. For instance, in some embodiments the CD19 CAR comprises a CD3 zeta signaling domain and the CD20 CAR comprises a costimulatory domain, e.g., a 41BB, CD27 or CD28 costimulatory domain, while in some embodiments, the CD19 CAR comprises a costimulatory domain, e.g., a 41BB, CD27 or CD28 costimulatory domain and the CD20 CAR comprises a CD3 zeta signaling domain. In other embodiments, each of the CD19 CAR and the CD20 CAR comprises the same type of primary signaling domain, e.g., a CD3 zeta signaling domain, but the CD19 CAR and the CD20 CAR comprise different costimulatory domains, e.g., (1) the CD19 CAR comprises a 41BB costimulatory domain and the CD20 CAR comprises a different costimulatory domain e.g., a CD27 costimulatory domain, (2) the CD19 CAR comprises a CD27 costimulatory domain and the CD20 CAR comprises a different costimulatory domain e.g., a 41BB costimulatory domain, (3) the CD19 CAR comprises a 41BB costimulatory domain and the CD20 CAR comprises a CD28 costimulatory domain, (4) the CD19 CAR comprises a CD28 costimulatory domain and the CD20 CAR comprises a different costimulatory domain e.g., a 41BB costimulatory domain, (5) the CD19 CAR comprises a CD27 costimulatory domain and the CD20 CAR comprises a CD28 costimulatory domain, or (6) the CD19 CAR comprises a CD28 costimulatory domain and the CD20 CAR comprises a CD27 costimulatory domain. In another embodiment, a cell comprises a CAR that comprises both a CD19 antigen-binding domain and a CD20 antigen-binding domain, e.g., a bispecific antibody.

[0104] As another example, when the first B-cell inhibitor is a CD19 CAR-expressing cell and the second B-cell inhibitor is a CD22 CAR-expressing cell, the first CAR and second CAR may be expressed by the same cell type or different types. For instance, in some embodiments, the cell expressing a CD19 CAR is a CD4+ T cell and the cell expressing a CD22 CAR is a CD8+ T cell, or the cell expressing a CD19 CAR is a CD8+ T cell and the cell expressing a CD22 CAR is a CD4+ T cell. In other embodiments, the cell expressing a CD19 CAR is a T cell and the cell expressing a CD22 CAR is a NK cell, or the cell expressing a CD19 CAR is a NK cell and the cell expressing a CD22 CAR is a T cell. In other embodiments, the cell expressing a CD19 CAR and the cell expressing a CD22 CAR are both NK cells or are both T cells, e.g., are both CD4+ T cells, or are both CD8+ T cells. In yet other embodiments, a single cell expresses the CD19 CAR and CD22 CAR, and this cell is, e.g., a NK cell or a T cell such as a CD4+ T cell or CD8+ T cell. The first CAR and second CAR can comprise the same or different intracellular signaling domains. For instance, in some embodiments the CD19 CAR comprises a CD3 zeta signaling domain and the CD22 CAR comprises a costimulatory domain, e.g., a 41BB, CD27 or CD28 costimulatory domain, while in some embodiments, the CD19 CAR comprises a costimulatory domain, e.g., a 41BB, CD27 or CD28 costimulatory domain and the CD22 CAR comprises a CD3 zeta signaling domain. In other embodiments, each of the CD19 CAR and the CD22 CAR comprises the same type of primary signaling domain, e.g., a CD3 zeta signaling domain, but the CD19 CAR and the CD22 CAR comprise different costimulatory domains, e.g., (1) the CD19 CAR comprises a 41BB costimulatory domain and the CD22 CAR comprises a different costimulatory domain e.g., a CD27 costimulatory domain, (2) the CD19 CAR comprises a CD27 costimulatory domain and the CD22 CAR comprises a different costimulatory domain e.g., a 41BB costimulatory domain, (3) the CD19 CAR comprises a 41BB costimulatory domain and the CD22 CAR comprises a CD28 costimulatory domain, (4) the CD19 CAR comprises a CD28 costimulatory domain and the CD22 CAR comprises a different costimulatory domain e.g., a 41BB costimulatory domain, (5) the CD19 CAR comprises a CD27 costimulatory domain and the CD22 CAR comprises a CD28 costimulatory domain, or (6) the CD19 CAR comprises a CD28 costimulatory domain and the CD22 CAR comprises a CD27 costimulatory domain. In another embodiment, a cell comprises a CAR that comprises both a CD19 antigen-binding domain and a CD22 antigen-binding domain, e.g., a bispecific antibody.

[0105] As another example, when the first B-cell inhibitor is a CD19 CAR-expressing cell and the second B-cell inhibitor is a CD34 CAR-expressing cell, the first CAR and second CAR may be expressed by the same cell type or different types. For instance, in some embodiments, the cell expressing a CD19 CAR is a CD4+ T cell and the cell expressing a CD34 CAR is a CD8+ T cell, or the cell expressing a CD19 CAR is a CD8+ T cell and the cell expressing a CD34 CAR is a CD4+ T cell. In other embodiments, the cell expressing a CD19 CAR is a T cell and the cell expressing a CD34 CAR is a NK cell, or the cell expressing a CD19 CAR is a NK cell and the cell expressing a CD34 CAR is a T cell. In other embodiments, the cell expressing a CD19 CAR and the cell expressing a CD34 CAR are both NK cells or are both T cells, e.g., are both CD4+ T cells, or are both CD8+ T cells. In yet other embodiments, a single cell expresses the CD19 CAR and CD34 CAR, and this cell is, e.g., a NK cell or a T cell such as a CD4+ T cell or CD8+ T cell. The first CAR and second CAR can comprise the same or different intracellular signaling domains. For instance, in some embodiments the CD19 CAR comprises a CD3 zeta signaling domain and the CD34 CAR comprises a costimulatory domain, e.g., a 41BB, CD27 or CD28 costimulatory domain, while in some embodiments, the CD19 CAR comprises a costimulatory domain, e.g., a 41BB, CD27 or CD28 costimulatory domain and the CD34 CAR comprises a CD3 zeta signaling domain. In other embodiments, each of the CD19 CAR and the CD34 CAR comprises the same type of primary signaling domain, e.g., a CD3 zeta signaling domain, but the CD19 CAR and the CD34 CAR comprise different costimulatory domains, e.g., (1) the CD19 CAR comprises a 41BB costimulatory domain and the CD34 CAR comprises a different costimulatory domain e.g., a CD27 costimulatory domain, (2) the CD19 CAR comprises a CD27 costimulatory domain and the CD34 CAR comprises a different costimulatory domain e.g., a 41BB costimulatory domain, (3) the CD19 CAR comprises a 41BB costimulatory domain and the CD34 CAR comprises a CD28 costimulatory domain, (4) the CD19 CAR comprises a CD28 costimulatory domain and the CD34 CAR comprises a different costimulatory domain e.g., a 41BB costimulatory domain, (5) the CD19 CAR comprises a CD27 costimulatory domain and the CD34 CAR comprises a CD28 costimulatory domain, or (6) the CD19 CAR comprises a CD28 costimulatory domain and the CD34 CAR comprises a CD27 costimulatory domain. In another embodiment, a cell comprises a CAR that comprises both a CD19 antigen-binding domain and a CD34 antigen-binding domain, e.g., a bispecific antibody.

[0106] As another example, when the first B-cell inhibitor is a CD19 CAR-expressing cell and the second B-cell inhibitor is a CD123 CAR-expressing cell, the first CAR and second CAR may be expressed by the same cell type or different types. For instance, in some embodiments, the cell expressing a CD19 CAR is a CD4+ T cell and the cell expressing a CD123 CAR is a CD8+ T cell, or the cell expressing a CD19 CAR is a CD8+ T cell and the cell expressing a CD123 CAR is a CD4+ T cell. In other embodiments, the cell expressing a CD19 CAR is a T cell and the cell expressing a CD123 CAR is a NK cell, or the cell expressing a CD19 CAR is a NK cell and the cell expressing a CD123 CAR is a T cell. In other embodiments, the cell expressing a CD19 CAR and the cell expressing a CD123 CAR are both NK cells or are both T cells, e.g., are both CD4+ T cells, or are both CD8+ T cells. In yet other embodiments, a single cell expresses the CD19 CAR and CD123 CAR, and this cell is, e.g., a NK cell or a T cell such as a CD4+ T cell or CD8+ T cell. The first CAR and second CAR can comprise the same or different intracellular signaling domains. For instance, in some embodiments the CD19 CAR comprises a CD3 zeta signaling domain and the CD123 CAR comprises a costimulatory domain, e.g., a 41BB, CD27 or CD28 costimulatory domain, while in some embodiments, the CD19 CAR comprises a costimulatory domain, e.g., a 41BB, CD27 or CD28 costimulatory domain and the CD123 CAR comprises a CD3 zeta signaling domain. In other embodiments, each of the CD19 CAR and the CD123 CAR comprises the same type of primary signaling domain, e.g., a CD3 zeta signaling domain, but the CD19 CAR and the CD123 CAR comprise different costimulatory domains, e.g., (1) the CD19 CAR comprises a 41BB costimulatory domain and the CD123 CAR comprises a different costimulatory domain e.g., a CD27 costimulatory domain, (2) the CD19 CAR comprises a CD27 costimulatory domain and the CD123 CAR comprises a different costimulatory domain e.g., a 41BB costimulatory domain, (3) the CD19 CAR comprises a 41BB costimulatory domain and the CD123 CAR comprises a CD28 costimulatory domain, (4) the CD19 CAR comprises a CD28 costimulatory domain and the CD123 CAR comprises a different costimulatory domain e.g., a 41BB costimulatory domain, (5) the CD19 CAR comprises a CD27 costimulatory domain and the CD123 CAR comprises a CD28 costimulatory domain, or (6) the CD19 CAR comprises a CD28 costimulatory domain and the CD123 CAR comprises a CD27 costimulatory domain. In another embodiment, a cell comprises a CAR that comprises both a CD19 antigen-binding domain and a CD123 antigen-binding domain, e.g., a bispecific antibody.

[0107] As another example, when the first B-cell inhibitor is a CD19 CAR-expressing cell and the second B-cell inhibitor is a FLT-3 CAR-expressing cell, the first CAR and second CAR may be expressed by the same cell type or different types. For instance, in some embodiments, the cell expressing a CD19 CAR is a CD4+ T cell and the cell expressing a FLT-3 CAR is a CD8+ T cell, or the cell expressing a CD19 CAR is a CD8+ T cell and the cell expressing a FLT-3 CAR is a CD4+ T cell. In other embodiments, the cell expressing a CD19 CAR is a T cell and the cell expressing a FLT-3 CAR is a NK cell, or the cell expressing a CD19 CAR is a NK cell and the cell expressing a FLT-3 CAR is a T cell. In other embodiments, the cell expressing a CD19 CAR and the cell expressing a FLT-3 CAR are both NK cells or are both T cells, e.g., are both CD4+ T cells, or are both CD8+ T cells. In yet other embodiments, a single cell expresses the CD19 CAR and FLT-3 CAR, and this cell is, e.g., a NK cell or a T cell such as a CD4+ T cell or CD8+ T cell. The first CAR and second CAR can comprise the same or different intracellular signaling domains. For instance, in some embodiments the CD19 CAR comprises a CD3 zeta signaling domain and the FLT-3 CAR comprises a costimulatory domain, e.g., a 41BB, CD27 or CD28 costimulatory domain, while in some embodiments, the CD19 CAR comprises a costimulatory domain, e.g., a 41BB, CD27 or CD28 costimulatory domain and the FLT-3 CAR comprises a CD3 zeta signaling domain. In other embodiments, each of the CD19 CAR and the FLT-3 CAR comprises the same type of primary signaling domain, e.g., a CD3 zeta signaling domain, but the CD19 CAR and the FLT-3 CAR comprise different costimulatory domains, e.g., (1) the CD19 CAR comprises a 41BB costimulatory domain and the FLT-3 CAR comprises a different costimulatory domain e.g., a CD27 costimulatory domain, (2) the CD19 CAR comprises a CD27 costimulatory domain and the FLT-3 CAR comprises a different costimulatory domain e.g., a 41BB costimulatory domain, (3) the CD19 CAR comprises a 41BB costimulatory domain and the FLT-3 CAR comprises a CD28 costimulatory domain, (4) the CD19 CAR comprises a CD28 costimulatory domain and the FLT-3 CAR comprises a different costimulatory domain e.g., a 41BB costimulatory domain, (5) the CD19 CAR comprises a CD27 costimulatory domain and the FLT-3 CAR comprises a CD28 costimulatory domain, or (6) the CD19 CAR comprises a CD28 costimulatory domain and the FLT-3 CAR comprises a CD27 costimulatory domain. In another embodiment, a cell comprises a CAR that comprises both a CD19 antigen-binding domain and a FLT-3 antigen-binding domain, e.g., a bispecific antibody.

[0108] As another example, when the first B-cell inhibitor is a CD19 CAR-expressing cell and the second B-cell inhibitor is a ROR1 CAR-expressing cell, the first CAR and second CAR may be expressed by the same cell type or different types. For instance, in some embodiments, the cell expressing a CD19 CAR is a CD4+ T cell and the cell expressing a ROR1 CAR is a CD8+ T cell, or the cell expressing a CD19 CAR is a CD8+ T cell and the cell expressing a ROR1 CAR is a CD4+ T cell. In other embodiments, the cell expressing a CD19 CAR is a T cell and the cell expressing a ROR1 CAR is a NK cell, or the cell expressing a CD19 CAR is a NK cell and the cell expressing a ROR1 CAR is a T cell. In other embodiments, the cell expressing a CD19 CAR and the cell expressing a ROR1 CAR are both NK cells or are both T cells, e.g., are both CD4+ T cells, or are both CD8+ T cells. In yet other embodiments, a single cell expresses the CD19 CAR and ROR1 CAR, and this cell is, e.g., a NK cell or a T cell such as a CD4+ T cell or CD8+ T cell. The first CAR and second CAR can comprise the same or different intracellular signaling domains. For instance, in some embodiments the CD19 CAR comprises a CD3 zeta signaling domain and the ROR1 CAR comprises a costimulatory domain, e.g., a 41BB, CD27 or CD28 costimulatory domain, while in some embodiments, the CD19 CAR comprises a costimulatory domain, e.g., a 41BB, CD27 or CD28 costimulatory domain and the ROR1 CAR comprises a CD3 zeta signaling domain. In other embodiments, each of the CD19 CAR and the ROR1 CAR comprises the same type of primary signaling domain, e.g., a CD3 zeta signaling domain, but the CD19 CAR and the ROR1 CAR comprise different costimulatory domains, e.g., (1) the CD19 CAR comprises a 41BB costimulatory domain and the ROR1 CAR comprises a different costimulatory domain e.g., a CD27 costimulatory domain, (2) the CD19 CAR comprises a CD27 costimulatory domain and the ROR1 CAR comprises a different costimulatory domain e.g., a 41BB costimulatory domain, (3) the CD19 CAR comprises a 41BB costimulatory domain and the ROR1 CAR comprises a CD28 costimulatory domain, (4) the CD19 CAR comprises a CD28 costimulatory domain and the ROR1 CAR comprises a different costimulatory domain e.g., a 41BB costimulatory domain, (5) the CD19 CAR comprises a CD27 costimulatory domain and the ROR1 CAR comprises a CD28 costimulatory domain, or (6) the CD19 CAR comprises a CD28 costimulatory domain and the ROR1 CAR comprises a CD27 costimulatory domain. In another embodiment, a cell comprises a CAR that comprises both a CD19 antigen-binding domain and a ROR1 antigen-binding domain, e.g., a bispecific antibody.

[0109] More generally, when the first B-cell inhibitor comprises a CD19 CAR and there is a second B-cell inhibitor e.g., which comprises a second CAR, the first CAR and the second B-cell inhibitor may be expressed by the same cell type or different types. For instance, in some embodiments, the cell expressing a CD19 CAR is a CD4+ T cell and the cell expressing the second B-cell inhibitor is a CD8+ T cell, or the cell expressing a CD19 CAR is a CD8+ T cell and the cell expressing the second B-cell inhibitor is a CD4+ T cell. In other embodiments, the cell expressing a CD19 CAR is a T cell and the cell expressing a second B-cell inhibitor is a NK cell, or the cell expressing a CD19 CAR is a NK cell and the cell expressing a second B-cell inhibitor is a T cell. In other embodiments, the cell expressing a CD19 CAR and the cell expressing a second B-cell inhibitor are both NK cells or are both T cells, e.g., are both CD4+ T cells, or are both CD8+ T cells. In yet other embodiments, a single cell expresses the CD19 CAR and the second B-cell inhibitor, and this cell is, e.g., a NK cell or a T cell such as a CD4+ T cell or CD8+ T cell. The first CAR and second CAR can comprise the same or different intracellular signaling domains. For instance, in some embodiments the CD19 CAR comprises a CD3 zeta signaling domain and second B-cell inhibitor (or CAR), comprises a costimulatory domain, e.g., a 41BB, CD27 or CD28 costimulatory domain, while in some embodiments, the CD19 CAR comprises a costimulatory domain, e.g., a 41BB, CD27 or CD28 costimulatory domain and the second B-cell inhibitor (or second CAR), comprises a CD3 zeta signaling domain. In other embodiments, each of the CD19 CAR and the second B-cell inhibitor (or second CAR), comprises the same type of primary signaling domain, e.g., a CD3 zeta signaling domain, but the CD19 CAR and the second B-cell inhibitor comprise different costimulatory domains, e.g., (1) the CD19 CAR comprises a 41BB costimulatory domain and the second B-cell inhibitor (or second CAR), comprises a different costimulatory domain e.g., a CD27 costimulatory domain, (2) the CD19 CAR comprises a CD27 costimulatory domain and the second B-cell inhibitor (or second CAR) comprises a different costimulatory domain e.g., a 41BB costimulatory domain, (3) the CD19 CAR comprises a 41BB costimulatory domain and the second B-cell inhibitor (or second CAR), comprises a CD28 costimulatory domain, (4) the CD19 CAR comprises a CD28 costimulatory domain and the second B-cell inhibitor (or second CAR) comprises a different costimulatory domain e.g., a 41BB costimulatory domain, (5) the CD19 CAR comprises a CD27 costimulatory domain and the second B-cell inhibitor (or second CAR), comprises a CD28 costimulatory domain, or (6) the CD19 CAR comprises a CD28 costimulatory domain and the second B-cell inhibitor (or second CAR), comprises a CD27 costimulatory domain. In another embodiment, a cell comprises a CAR that comprises both a CD19 antigen-binding domain and an antigen-binding domain directed to a second antigen, e.g., a bispecific antibody.

[0110] In one embodiment, the 4-1BB costimulatory domain comprises a sequence of SEQ ID NO: 16. In one embodiment, the 4-1BB costimulatory domain comprises an amino acid sequence having at least one, two or three modifications (e.g., substitutions) but not more than 20, 10 or 5 modifications (e.g., substitutions) of an amino acid sequence of SEQ ID NO: 16, or a sequence with 95-99% identity to an amino acid sequence of SEQ ID NO:16. In one embodiment, the 4-1BB costimulatory domain is encoded by a nucleic acid sequence of SEQ ID NO:60, or a sequence with 95-99% identity thereof.

[0111] In one embodiment, the CD27 costimulatory domain comprises a sequence of SEQ ID NO: 16. In one embodiment, the CD27 costimulatory domain comprises an amino acid sequence having at least one, two or three modifications (e.g., substitutions) but not more than 20, 10 or 5 modifications (e.g., substitutions) of an amino acid sequence of SEQ ID NO: 16, or a sequence with 95-99% identity to an amino acid sequence of SEQ ID NO:16. In one embodiment, the CD27 costimulatory domain is encoded by a nucleic acid sequence of SEQ ID NO:17, or a sequence with 95-99% identity thereof.

[0112] In one embodiment, the CD28 costimulatory domain comprises a sequence of SEQ ID NO: 1317. In one embodiment, the CD28 costimulatory domain comprises an amino acid sequence having at least one, two or three modifications (e.g., substitutions) but not more than 20, 10 or 5 modifications (e.g., substitutions) of an amino acid sequence of SEQ ID NO: 1317, or a sequence with 95-99% identity to an amino acid sequence of SEQ ID NO:1317. In one embodiment, the CD28 costimulatory domain is encoded by a nucleic acid sequence of SEQ ID NO:1318, or a sequence with 95-99% identity thereof.

[0113] In one embodiment, the wild-type ICOS costimulatory domain comprises a sequence of SEQ ID NO: 1319. In one embodiment, the wild-type ICOS costimulatory domain comprises an amino acid sequence having at least one, two or three modifications (e.g., substitutions) but not more than 20, 10 or 5 modifications (e.g., substitutions) of an amino acid sequence of SEQ ID NO: 1319, or a sequence with 95-99% identity to an amino acid sequence of SEQ ID NO: 1319. In one embodiment, the wild-type ICOS costimulatory domain is encoded by a nucleic acid sequence of SEQ ID NO: 1320, or a sequence with 95-99% identity thereof.

[0114] In one embodiment, the Y to F mutant ICOS costimulatory domain comprises a sequence of SEQ ID NO: 1321. In one embodiment, the Y to F mutant ICOS costimulatory domain comprises an amino acid sequence having at least one, two or three modifications (e.g., substitutions) but not more than 20, 10 or 5 modifications (e.g., substitutions) of an amino acid sequence of SEQ ID NO: 1321, or a sequence with 95-99% identity to an amino acid sequence of SEQ ID NO: 1321. In one embodiment, the Y to F mutant ICOS costimulatory domain is encoded by a nucleic acid sequence with 95-99% identity to a nucleic acid sequence of SEQ ID NO:1320 (wherein SEQ ID NO: 1320 encodes wild-type ICOS).

[0115] In embodiments, the primary signaling domain comprises a functional signaling domain of CD3 zeta. In embodiments, the functional signaling domain of CD3 zeta comprises SEQ ID NO: 17 (mutant CD3 zeta) or SEQ ID NO: 43 (wild-type human CD3 zeta).

[0116] In one embodiment, the method includes administering a population of cells wherein at least one cell in the population expresses a CAR, e.g., having an anti-CD19 domain described herein, and an agent which enhances the activity of a CAR-expressing cell, e.g., a second cell expressing the agent which enhances the activity of a CAR-expressing cell. For example, in one embodiment, the agent can be an agent which inhibits an immune inhibitory molecule. Examples of immune inhibitory molecules include PD1, PD-L1, CTLA4, TIM3, CEACAM (e.g., CEACAM-1, CEACAM-3 and/or CEACAM-5), LAG3, VISTA, BTLA, TIGIT, LAIR1, CD160, 2B4 and TGFR beta. In one embodiment, the agent that inhibits an immune inhibitory molecule comprises a first polypeptide, e.g., an inhibitory molecule, associated with a second polypeptide that provides a positive signal to the cell, e.g., an intracellular signaling domain described herein. In one embodiment, the agent comprises a first polypeptide, e.g., of an inhibitory molecule such as PD1, PD-L1, CTLA4, TIM3, CEACAM (e.g., CEACAM-1, CEACAM-3 and/or CEACAM-5), LAG3, VISTA, BTLA, TIGIT, LAIR1, CD160, 2B4 or TGFR beta, or a fragment of any of these (e.g., at least a portion of an extracellular domain of any of these), and a second polypeptide which is an intracellular signaling domain described herein (e.g., comprising a costimulatory domain (e.g., 41BB, CD27 or CD28, e.g., as described herein) and/or a primary signaling domain (e.g., a CD3 zeta signaling domain described herein). In one embodiment, the agent comprises a first polypeptide of PD1 or a fragment thereof (e.g., at least a portion of the extracellular domain of PD1), and a second polypeptide of an intracellular signaling domain described herein (e.g., a CD28 signaling domain described herein and/or a CD3 zeta signaling domain described herein).

[0117] In an embodiment, the B-cell inhibitor comprises an inhibitor of one or more of CD10, CD19, CD20, CD22, CD34, FLT-3, or ROR1. In an embodiment, the B-cell inhibitor comprises an effective number of one or more cells that express a CAR molecule that binds one or more of CD10, CD20, CD22, CD34, FLT-3, ROR1, CD79b, CD179b, or CD79a. In an embodiment, the B-cell inhibitor comprises a CD123 CAR. In an embodiment, the B cell inhibitor comprises one or more cells that express a CAR molecule that binds CD123. In an embodiment, the disease is a CD19-negative cancer, e.g., a CD19-negative relapsed cancer. In an embodiment, the CD19 CAR-expressing cell is administered simultaneously with, before, or after the one or more B-cell inhibitor.

[0118] In an embodiment, the method further comprises administering a CD19 inhibitor, e.g., a CD19 CAR-expressing cell. In an embodiment, the CD19 inhibitor comprises a CD19 CAR and the B-cell inhibitor comprises a CD123 CAR. In an embodiment, the CD19 CAR or CD123 CAR comprises a split intracellular signaling domain such that full activation of the cell, e.g., the population of immune effector cells, occurs when both the CD19 CAR and CD123 CAR bind to a target cell, e.g., a target CD19+CD123+ cell (e.g., a B-ALL blast cell), compared to activation when the CD19 CAR and CD123 CAR bind to a target cell that expresses one of CD19 or CD123 (e.g., a hematopoietic stem cell). In an embodiment, the CD comprises a 4-1BB signaling domain and the CD19 CAR comprises a CD3 zeta signaling domain. In an embodiment, the CD123CAR comprises a costimulatory domain, e.g., a 4-1BB signaling domain, and the CD19 CAR comprises a primary signaling domain, e.g., a CD3 zeta signaling domain. In an embodiment, the CD123CAR comprises a primary signaling domain, e.g., a CD3 zeta signaling domain, and the CD19 CAR comprises a costimulatory domain, e.g., a 4-1BB signaling domain. In an embodiment, the B cell inhibitor comprises a CAR (e.g., a CAR directed against CD10, CD20, CD22, CD34, CD123, FLT-3, ROR1, CD79b, CD179b, or CD79a) which comprises a costimulatory domain, and the CD19 CAR comprises a primary signaling domain. In an embodiment, the B cell inhibitor comprises a CAR (e.g., a CAR directed against CD10, CD20, CD22, CD34, CD123, FLT-3, ROR1, CD79b, CD179b, or CD79a) which comprises a primary signalling domain, and the CD19 CAR comprises a costimulatory domain. In an embodiment, the B-cell inhibitor comprises one or more cells that express a CAR molecule that binds CD123, and wherein a CD19 CAR-expressing cell is administered simultaneously with the B-cell inhibitor. In an embodiment, the CD123CAR comprises a 4-1BB signaling domain and the CD19 CAR comprises a CD3 zeta signaling domain.

[0119] In an embodiment, the method further comprises transplanting a cell, e.g., a hematopoietic stem cell, or a bone marrow, into the mammal.

[0120] In another aspect, the invention pertains to a cell expressing a CAR molecule described herein, e.g., a CD19 CAR molecule, for use as a medicament in combination with a B-cell inhibitor, e.g., a B-cell inhibitor described herein. In another aspect, the invention pertains to a B-cell inhibitor described herein for use as a medicament in combination with a cell expressing a CAR molecule, e.g., a CD19 CAR molecule, described herein.

[0121] In another aspect, the invention pertains to a cell expressing a CAR molecule described herein, e.g., a CD19 CAR molecule, for use in combination with a B-cell inhibitor, e.g., a B-cell inhibitor described herein, in the treatment of a disease expressing CD19. In another aspect, the invention pertains to a B-cell inhibitor described herein for use in combination with a cell expressing a CAR molecule described herein, e.g., a CD19 CAR molecule, in the treatment of a disease expressing CD19. In another aspect, the invention pertains to a cell expressing a CAR molecule described herein, e.g., a CD19 CAR molecule, for use in combination with a B-cell inhibitor, e.g., a B-cell inhibitor described herein, in the treatment of a cancer, e.g., a cancer described herein.

[0122] In one embodiment, the method includes administering a population of cells wherein at least one cell in the population expresses a therapy herein (e.g., a CD20 CAR, a CD22 CAR, or a CAR having an anti-CD19 domain described herein in combination with a B-cell inhibitor) and an agent which enhances the activity of a CAR-expressing cell, wherein the agent is a cytokine, e.g., IL-7, IL-15, IL-21, or a combination thereof. The cytokine can be delivered in combination with, e.g., simultaneously or shortly after, administration of the CAR-expressing cell(s). Alternatively, the cytokine can be delivered after a prolonged period of time after administration of the CAR-expressing cell(s), e.g., after assessment of the subject's response to the CAR-expressing cell(s). Related compositions for use and methods of making a medicament are also provided.

[0123] In one embodiment, the cells described herein (e.g., cells expressing a CD20 CAR molecule, cells expressing a CD22 CAR molecule, or cells expressing a CD19 CAR molecule, e.g., a CD19 CAR molecule described herein, combination with a B-cell inhibitor) are administered in combination with an agent that increases the efficacy of a cell expressing a CAR molecule or one of the inhibitors, e.g., an agent described herein.

[0124] In one embodiment, the cells described herein (e.g., cells expressing a CD20 CAR molecule, cells expressing a CD22 CAR molecule, or expressing a CD19 CAR molecule, e.g., a CD19 CAR molecule described herein, in combination with a B-cell inhibitor) are administered in combination with an agent that ameliorates one or more side effect associated with administration of a cell expressing a CAR molecule or one of the inhibitors, e.g., an agent described herein.

[0125] In one embodiment, the cells expressing a CD19 CAR molecule, e.g., a CD19 CAR molecule described herein, are administered in combination with a B-cell inhibitor, and an agent that treats Hodgkin lymphoma, e.g., an agent described herein.

[0126] In some aspects, the disclosure provides a method of treating a patient who is a non-responder, partial responder, or relapser to a CD19 inhibitor, e.g., a CD19 CAR therapy, comprising administering to the patient a B-cell inhibitor, e.g., a B-cell inhibitor as described herein, e.g., an inhibitor of one or more of (e.g., 2, 3, 4, 5, 6, 7, 8, 9, or all of) CD10, CD20, CD22, CD34, CD123, FLT-3, ROR1, CD79b, CD179b, or CD79a. In embodiments, the B-cell inhibitor is a CAR-expressing cell (e.g., T cell or NK cell) that is an inhibitor of one or more of (e.g., 2, 3, 4, 5, 6, or all of) CD10, CD20, CD22, CD34, CD123, FLT-3, or ROR1. In embodiments, the patient has, or is identified as having, a CD19-negative cancer cell and a cancer cell that is positive for one or more of (e.g., 2, 3, 4, 5, 6, 7, 8, 9, or all of) CD10, CD20, CD22, CD34, CD123, FLT-3, ROR1, CD79b, CD179b, or CD79a. In embodiments, the method further comprises administering to the patient a B-cell inhibitor for which the cancer cell is positive, e.g., an inhibitor of one or more of (e.g., 2, 3, 4, 5, 6, 7, 8, 9, or all of) the CD10, CD20, CD22, CD34, CD123, FLT-3, ROR1, CD79b, CD179b, or CD79a for which the cancer cell is positive. In embodiments, the method further comprises one or both of a step of determining whether the patient comprises a CD19-negative cancer cell, and a step of determining whether the patient comprises a cancer cell that is positive for one or more of (e.g., 2, 3, 4, 5, 6, 7, 8, 9, or all of) CD10, CD20, CD22, CD34, CD123, FLT-3, ROR1, CD79b, CD179b, or CD79a. In embodiments, the subject has or is identified as having a population of tumor or cancer cells that test negative for CD19 expression as measured by binding to an anti-CD19 antibody, e.g., an antibody with the same specificity as any of the CAR molecules in Table 2 or Table 3.

[0127] In another aspect, the invention features a composition comprising a cell expressing a Chimeric Antigen Receptor (CAR) molecule that binds CD19, in combination with a B-cell inhibitor, e.g., a B-cell inhibitor chosen from an inhibitor of CD10, CD19, CD20, CD22, CD34, CD123, FLT-3, ROR1, CD79b, CD179b, or CD79a, or a combination thereof. The CAR-expressing cell and the B-cell inhibitor can be present in a single dose form, or as two or more dose forms.

[0128] In an embodiment, the composition is a pharmaceutically acceptable composition.

[0129] In embodiments, the compositions disclosed herein (e.g., nucleic acids, vectors, or cells) are for use as a medicament.

[0130] In embodiments, the compositions disclosed herein are use in the treatment of a disease associated with expression of a B-cell antigen (e.g., CD19), e.g., a B-cell leukemia or lymphoma.

### CD19 Inhibitors

[0131] In embodiments, the CD19 inhibitor is a small molecule, an antibody, a fragment of an antibody, or a cell therapy.

[0132] In some embodiments, the CD19 inhibitor (e.g., a cell therapy or an antibody) is administered in combination with, or is present in a composition together with, a B cell inhibitor, e.g., one or more inhibitors of CD10, CD19, CD20, CD22, CD34, CD123, FLT-3, ROR1, CD79b, CD179b, or CD79a.

[0133] In one embodiment, the cell expresses a CAR molecule comprising an anti-CD19 binding domain (e.g., a murine or humanized antibody or antibody fragment that specifically binds to CD19), a transmembrane domain, and an intracellular signaling domain (e.g., an intracellular signaling domain comprising a costimulatory domain and/or a primary signaling domain). In one embodiment, the CAR comprises an antibody or antibody fragment which includes an anti-CD19 binding domain described herein (e.g., a murine or humanized antibody or antibody fragment that specifically binds to CD19 as described herein), a transmembrane domain described herein, and an intracellular signaling domain described herein (e.g., an intracellular signaling domain comprising a costimulatory domain and/or a primary signaling domain described herein).

[0134] In one embodiment, the CAR molecule comprises an anti-CD19 binding domain comprising one or more (e.g., all three) light chain complementarity determining region 1 (LC CDR1), light chain complementarity determining region 2 (LC CDR2), and light chain complementarity determining region 3 (LC CDR3) of an anti-CD19 binding domain described herein, and one or more (e.g., all three) heavy chain complementarity determining region 1 (HC CDR1), heavy chain complementarity determining region 2 (HC CDR2), and heavy chain complementarity determining region 3 (HC CDR3) of an anti-CD19 binding domain described herein, e.g., an anti-CD19 binding domain comprising one or more, e.g., all three, LC CDRs and one or more, e.g., all three, HC CDRs. In one embodiment, the anti-CD19 binding domain comprises one or more (e.g., all three) heavy chain complementarity determining region 1 (HC CDR1), heavy chain complementarity determining region 2 (HC CDR2), and heavy chain complementarity determining region 3 (HC CDR3) of an anti-CD19 binding domain described herein, e.g., the anti-CD19 binding domain has two variable heavy chain regions, each comprising a HC CDR1, a HC CDR2 and a HC CDR3 described herein. In one embodiment, the anti-CD19 binding domain comprises a murine light chain variable region described herein (e.g., in Table 3) and/or a murine heavy chain variable region described herein (e.g., in Table 3). In one embodiment, the anti-CD19 binding domain is a scFv comprising a murine light chain and a murine heavy chain of an amino acid sequence of Table 3. In an embodiment, the anti-CD19 binding domain (e.g., an scFv) comprises: a light chain variable region comprising an amino acid sequence having at least one, two or three modifications (e.g., substitutions) but not more than 30, 20 or 10 modifications (e.g., substitutions) of an amino acid sequence of a light chain variable region provided in Table 3, or a sequence with 95-99% identity with an amino acid sequence of Table 3; and/or a heavy chain variable region comprising an amino acid sequence having at least one, two or three modifications (e.g., substitutions) but not more than 30, 20 or 10 modifications (e.g., substitutions) of an amino acid sequence of a heavy chain variable region provided in Table 3, or a sequence with 95-99% identity to an amino acid sequence of Table 3. In one embodiment, the anti-CD19 binding domain comprises a sequence of SEQ ID NO:59, or a sequence with 95-99% identity thereof. In one embodiment, the anti-CD19 binding domain is a scFv, and a light chain variable region comprising an amino acid sequence described herein, e.g., in Table 3, is attached to a heavy chain variable region comprising an amino acid sequence described herein, e.g., in Table 3, via a linker, e.g., a linker described herein. In one embodiment, the anti-CD19 binding domain includes a (Gly₄-Ser)n linker, wherein n is 1, 2, 3, 4, 5, or 6, e.g., 3 or 4 (SEQ ID NO: 53). The light chain variable region and heavy chain variable region of a scFv can be, e.g., in any of the following orientations: light chain variable region-linker-heavy chain variable region or heavy chain variable region-linker-light chain variable region.

[0135] In one embodiment, the CAR molecule comprises a humanized anti-CD19 binding domain that includes one or more (e.g., all three) light chain complementarity determining region 1 (LC CDR1), light chain complementarity determining region 2 (LC CDR2), and light chain complementarity determining region 3 (LC CDR3) of a humanized anti-CD19 binding domain described herein, and one or more (e.g., all three) heavy chain complementarity determining region 1 (HC CDR1), heavy chain complementarity determining region 2 (HC CDR2), and heavy chain complementarity determining region 3 (HC CDR3) of a humanized anti-CD19 binding domain described herein, e.g., a humanized anti-CD19 binding domain comprising one or more, e.g., all three, LC CDRs and one or more, e.g., all three, HC CDRs. In one embodiment, the humanized anti-CD19 binding domain comprises at least HC CDR2. In one embodiment, the humanized anti-CD19 binding domain comprises one or more (e.g., all three) heavy chain complementarity determining region 1 (HC CDR1), heavy chain complementarity determining region 2 (HC CDR2), and heavy chain complementarity determining region 3 (HC CDR3) of a humanized anti-CD19 binding domain described herein, e.g., the humanized anti-CD19 binding domain has two variable heavy chain regions, each comprising a HC CDR1, a HC CDR2 and a HC CDR3 described herein. In one embodiment, the humanized anti-CD19 binding domain comprises at least HC CDR2. In one embodiment, the light chain variable region comprises one, two, three or all four framework regions of VK3_L25 germline sequence. In one embodiment, the light chain variable region has a modification (e.g., substitution, e.g., a substitution of one or more amino acid found in the corresponding position in the murine light chain variable region of SEQ ID NO: 58, e.g., a substitution at one or more of positions 71 and 87). In one embodiment, the heavy chain variable region comprises one, two, three or all four framework regions of VH4_4-59 germline sequence. In one embodiment, the heavy chain variable region has a modification (e.g., substitution, e.g., a substitution of one or more amino acid found in the corresponding position in the murine heavy chain variable region of SEQ ID NO: 58, e.g., a substitution at one or more of positions 71, 73 and 78). In one embodiment, the humanized anti-CD19 binding domain comprises a light chain variable region described herein (e.g., in Table 2) and/or a heavy chain variable region described herein (e.g., in Table 2). In one embodiment, the humanized anti-CD19 binding domain is a scFv comprising a light chain and a heavy chain of an amino acid sequence of Table 2. In an embodiment, the humanized anti-CD19 binding domain (e.g., an scFv) comprises: a light chain variable region comprising an amino acid sequence having at least one, two or three modifications (e.g., substitutions) but not more than 30, 20 or 10 modifications (e.g., substitutions) of an amino acid sequence of a light chain variable region provided in Table 2, or a sequence with 95-99% identity with an amino acid sequence of Table 2; and/or a heavy chain variable region comprising an amino acid sequence having at least one, two or three modifications (e.g., substitutions) but not more than 30, 20 or 10 modifications (e.g., substitutions) of an amino acid sequence of a heavy chain variable region provided in Table 2, or a sequence with 95-99% identity to an amino acid sequence of Table 2. In one embodiment, the humanized anti-CD19 binding domain comprises a sequence selected from a group consisting of SEQ ID NO:1, SEQ ID NO:2, SEQ ID NO:3, SEQ ID NO: 4, SEQ ID NO:5, SEQ ID NO:6, SEQ ID NO:7, SEQ ID NO:8, SEQ ID NO:9, SEQ ID NO:10, SEQ ID NO:11 and SEQ ID NO:12, or a sequence with 95-99% identity thereof. In one embodiment, the humanized anti-CD19 binding domain is a scFv, and a light chain variable region comprising an amino acid sequence described herein, e.g., in Table 2, is attached to a heavy chain variable region comprising an amino acid sequence described herein, e.g., in Table 2, via a linker, e.g., a linker described herein. In one embodiment, the humanized anti-CD19 binding domain includes a (Gly₄-Ser)n linker, wherein n is 1, 2, 3, 4, 5, or 6, e.g., 3 or 4 (SEQ ID NO: 53). The light chain variable region and heavy chain variable region of a scFv can be, e.g., in any of the following orientations: light chain variable region-linker-heavy chain variable region or heavy chain variable region-linker-light chain variable region.

[0136] In one embodiment, the CAR molecule comprises an anti-CD19 binding domain that includes one or more (e.g., 2, 3, 4, 5, or 6) LC CDR1, LC CDR2, LC CDR3, HC CDR1, HC CDR2, and HC CDR3 of a construct of Table 4 and 5, e.g., murine_CART19, humanized_CART19 a, humanized_CART19 b, or humanized_CART19 c.

[0137] In one embodiment, the CAR molecule comprises a leader sequence, e.g., a leader sequence described herein, e.g., a leader sequence of SEQ ID NO: 13, or having 95-99% identity thereof; an anti-CD19 binding domain described herein, e.g., an anti-CD19 binding domain comprising a LC CDR1, a LC CDR2, a LC CDR3, a HC CDR1, a HC CDR2 and a HC CDR3 described herein, e.g., a murine anti-CD19 binding domain described in Table 3, a humanized anti-CD19 binding domain described in Table 2, or a sequence with 95-99% identity thereof; a hinge region, e.g., a hinge region described herein, e.g., a hinge region of SEQ ID NO:14 or having 95-99% identity thereof; a transmembrane domain, e.g., a transmembrane domain described herein, e.g., a transmembrane domain having a sequence of SEQ ID NO:15 or a sequence having 95-99% identity thereof; an intracellular signaling domain, e.g., an intracellular signaling domain described herein (e.g., an intracellular signaling domain comprising a costimulatory domain and/or a primary signaling domain). In one embodiment, the intracellular signaling domain comprises a costimulatory domain, e.g., a costimulatory domain described herein, e.g., a 4-1BB costimulatory domain having a sequence of SEQ ID NO:16 or SEQ ID NO:51, or having 95-99% identity thereof, and/or a primary signaling domain, e.g., a primary signaling domain described herein, e.g., a CD3 zeta stimulatory domain having a sequence of SEQ ID NO:17 or SEQ ID NO:43, or having 95-99% identity thereof.

[0138] In one embodiment, the CAR molecule comprises (e.g., consists of) an amino acid sequence of SEQ ID NO:58, SEQ ID NO:31, SEQ ID NO:32, SEQ ID NO:33, SEQ ID NO:34, SEQ ID NO:35, SEQ ID NO:36, SEQ ID NO:37, SEQ ID NO:38, SEQ ID NO:39, SEQ ID NO:40, SEQ ID NO:41 or SEQ ID NO:42, or an amino acid sequence having at least one, two, three, four, five, 10, 15, 20 or 30 modifications (e.g., substitutions) but not more than 60, 50 or modifications (e.g., substitutions) of an amino acid sequence of SEQ ID NO:58, SEQ ID NO:31, SEQ ID NO:32, SEQ ID NO:33, SEQ ID NO:34, SEQ ID NO:35, SEQ ID NO:36, SEQ ID NO:37, SEQ ID NO:38, SEQ ID NO:39, SEQ ID NO:40, SEQ ID NO:41 or SEQ ID NO:42, or an amino acid sequence having 85%, 90%, 95%, 96%, 97%, 98% or 99% identity to an amino acid sequence of SEQ ID NO:58, SEQ ID NO:31, SEQ ID NO:32, SEQ ID NO:33, SEQ ID NO:34, SEQ ID NO:35, SEQ ID NO:36, SEQ ID NO:37, SEQ ID NO:38, SEQ ID NO:39, SEQ ID NO:40, SEQ ID NO:41 or SEQ ID NO:42.

[0139] The present invention relates generally, in some aspects, to the use of cells, e.g., T cells or natural killer (NK) cells, engineered to express a CAR in combination with one or more B-cell inhibitors to treat a disease associated with expression of the Cluster of Differentiation 19 protein (CD19). In some embodiments, the B-cell inhibitor is an inhibitor of one or more of CD10, CD19, CD20, CD22, CD34, CD123, FLT-3, ROR1, CD79b, CD179b, or CD79a.

[0140] In some embodiments, the CD19 inhibitor comprises an antibody molecule having, e.g., an antibody molecule having a CD19-binding sequence as described herein. For instance, the antibody molecule may comprise CDRs or a VH and VL as described in any of Tables 2, 3, 4, and 5, or a sequence with homology thereto, e.g., having 95-99% identity thereto. The antibody molecule may comprise a CD19-binding region having a sequence described in this section, e.g., in the context of a CAR.

[0141] In embodiments, the B-cell inhibitor is chosen from an inhibitory nucleic acid, a soluble ligand, an antibody or antigen-binding fragment thereof, a CAR, or a CAR-expressing cell that binds to one or more B-cell antigens, e.g., one or more of CD10, CD19, CD20, CD22, CD34, CD123, FLT-3, ROR1, CD79b, CD179b, or CD79a.

### CD20 Binding Domains and Inhibitors

[0142] In some aspects, the present disclosure provides a CD20 inhibitor or binding domain, e.g., a CD20 inhibitor or binding domain as described herein. The disclosure also provides a nucleic acid encoding the CD20 binding domain, e.g., encoding a CAR comprising the CD20 binding domain. The composition may also comprise a second agent, e.g., an anti-CD19 CAR-expressing cell or a CD19 binding domain. The agents may be, e.g., encoded by a single nucleic acid or different nucleic acids.

[0143] In some aspects, a CD20 inhibitor or binding domain is administered as a monotherapy. In some aspects, the CD20 inhibitor or binding domain is administered in combination with a second agent such as an anti-CD19 CAR-expressing cell.

[0144] The CD20 inhibitor may be, e.g., a small molecule, antibody or antigen-binding fragment thereof, a CAR or a CAR-expressing cell. In one embodiment, the CD20 inhibitor is an anti-CD20 antibody or fragment thereof. In an embodiment, the antibody is a monospecific antibody and in another embodiment the antibody is a bispecific antibody. In an embodiment, the CD20 inhibitor is a chimeric mouse/human monoclonal antibody, e.g., rituximab. In an embodiment, the CD20 inhibitor is a human monoclonal antibody such as ofatumumab. In an embodiment, the CD20 inhibitor is a humanized antibody such as ocrelizumab, veltuzumab, obinutuzumab, ocaratuzumab, or PRO131921 (Genentech). In an embodiment, the CD20 inhibitor is a fusion protein comprising a portion of an anti-CD20 antibody, such as TRU-015 (Trubion Pharmaceuticals).

[0145] In one embodiment, the CD20 inhibitor is an anti-CD20 expressing cell, e.g., CD20 CART or CD20-expressing NK cell.

[0146] In some embodiments, the CD20-CAR comprises an optional leader sequence (e.g., an optional leader sequence described herein), an extracellular antigen binding domain, a hinge (e.g., hinge described herein), a transmembrane domain (e.g., transmembrane domain described herein), and an intracellular stimulatory domain (e.g., intracellular stimulatory domain described herein). In one embodiment, an exemplary CD20 CAR construct comprises an optional leader sequence (e.g., a leader sequence described herein), an extracellular antigen binding domain, a hinge, a transmembrane domain, an intracellular costimulatory domain (e.g., an intracellular costimulatory domain described herein) and an intracellular stimulatory domain.

[0147] In one embodiment, the CD20 binding domain comprises one or more (e.g., all three) light chain complementarity determining region 1 (LC CDR1), light chain complementarity determining region 2 (LC CDR2), and light chain complementarity determining region 3 (LC CDR3) of a CD20 binding domain described herein, and/or one or more (e.g., all three) heavy chain complementarity determining region 1 (HC CDR1), heavy chain complementarity determining region 2 (HC CDR2), and heavy chain complementarity determining region 3 (HC CDR3) of a CD20 binding domain described herein, e.g., a CD20 binding domain comprising one or more, e.g., all three, LC CDRs and one or more, e.g., all three, HC CDRs. These CDRs may be, e.g., those of Table 12A, 12B, and/or Table 13. In one embodiment, the CD20 binding domain comprises one or more (e.g., all three) heavy chain complementarity determining region 1 (HC CDR1), heavy chain complementarity determining region 2 (HC CDR2), and heavy chain complementarity determining region 3 (HC CDR3) of a CD20 binding domain described herein, e.g., the CD20 binding domain has two variable heavy chain regions, each comprising a HC CDR1, a HC CDR2 and a HC CDR3 described herein. In one embodiment, the CD20 binding domain comprises a light chain variable region described herein (e.g., in Table 15A or 15B) and/or a heavy chain variable region described herein (e.g., in Table 14A or 14B). In one embodiment, the CD20 binding domain comprises a heavy chain variable region described herein (e.g., in Table 14A or 14B), e.g., at least two heavy chain variable regions described herein (e.g., in Table 14A or 14B). In one embodiment, the CD20 binding domain is a scFv comprising a light chain and a heavy chain of an amino acid sequence of Table 14A or 14B or 15A or 15B. In an embodiment, the CD20 binding domain (e.g., an scFv) comprises: a light chain variable region comprising an amino acid sequence having at least one, two or three modifications (e.g., substitutions) but not more than 30, 20 or 10 modifications (e.g., substitutions) of an amino acid sequence of a light chain variable region provided in Table 15A or 15B, or a sequence with 95-99% identity with an amino acid sequence of Table 15A or 15B; and/or a heavy chain variable region comprising an amino acid sequence having at least one, two or three modifications (e.g., substitutions) but not more than 30, 20 or 10 modifications (e.g., substitutions) of an amino acid sequence of a heavy chain variable region provided in Table 14A or 14B, or a sequence with 95-99% identity to an amino acid sequence of Table 14A or 14B. The CD20 binding domain may be part of, e.g., an antibody molecule or a CAR molecule.

[0148] In one embodiment, the CAR molecule comprises an anti-CD20 binding domain that includes one or more (e.g., 2, 3, 4, 5, or 6) LC CDR1, LC CDR2, LC CDR3, HC CDR1, HC CDR2, and HC CDR3 of a construct of Table 12A, 12B, and/or 13, e.g., CAR20-1, CAR20-2, CAR20-3, CAR20-4, CAR20-5, CAR20-6, CAR20-7, CAR20-8, CAR20-9, CAR20-10, CAR20-11, CAR20-12, CAR20-13, CAR20-14, CAR20-15, or CAR20-16.

[0149] In one embodiment, the CAR molecule comprises an anti-CD22 binding domain that includes a VL and/or VH of a construct of Table 14A or 14B and 15A or 15B, e.g., CAR20-1, CAR20-2, CAR20-3, CAR20-4, CAR20-5, CAR20-6, CAR20-7, CAR20-8, CAR20-9, CAR20-10, CAR20-11, CAR20-12, CAR20-13, CAR20-14, CAR20-15, or CAR20-16.

[0150] The CD20 scFv may be preceded by an optional leader sequence such as provided in SEQ ID NO: 13, and followed by an optional hinge sequence such as provided in SEQ ID NO: 14 or SEQ ID NO:45 or SEQ ID NO:47 or SEQ ID NO:49, a transmembrane region such as provided in SEQ ID NO:15, an intracellular signalling domain that includes SEQ ID NO:16 or SEQ ID NO:51 and a CD3 zeta sequence that includes SEQ ID NO:17 or SEQ ID NO:43, e.g., wherein the domains are contiguous with and in the same reading frame to form a single fusion protein.

[0151] Further embodiments include a nucleotide sequence that encodes a polypeptide of any of Tables 11A-15B Further embodiments include a nucleotide sequence that encodes a polypeptide any of Tables 11A-15B, and each of the domains of SEQ ID NOS: 13, 14, 15, 16, 17, and optionally 51.

[0152] In one embodiment, the CD20 binding domain is characterized by particular functional features or properties of an antibody or antibody fragment. For example, in one embodiment, the portion of a CAR composition of the invention that comprises an antigen binding domain specifically binds human CD20 or a fragment thereof.

[0153] In one embodiment, the CD20 binding domain is a fragment, e.g., a single chain variable fragment (scFv). In one embodiments, the CD20 binding domain is a Fv, a Fab, a (Fab′)2, or a bi-functional (e.g. bi-specific) hybrid antibody (e.g., Lanzavecchia et al., Eur. J. Immunol. 17, 105 (1987)). In one aspect, the antibodies and fragments thereof of the invention binds a CD20 protein or a fragment thereof with wild-type or enhanced affinity. In some instances, a human scFv can be derived from a display library.

[0154] In one embodiment, the CD20 binding domain, e.g., scFv comprises at least one mutation such that the mutated scFv confers improved stability to the CART20 construct. In another embodiment, the CD20 binding domain, e.g., scFv comprises at least 1, 2, 3, 4, 5, 6, 7, 8, 9, 10 mutations arising, e.g., from the humanization process, such that the mutated scFv confers improved stability to the CART20 construct.

[0155] In some embodiments, the CD20 inhibitor comprises an antibody molecule having, e.g., an antibody molecule having a CD20-binding sequence as described herein. For instance, the antibody molecule may comprise CDRs or a VH and VL as described in any of Tables 11A-15B, or a sequence with homology thereto, e.g., having 95-99% identity thereto. The antibody molecule may comprise a CD20-binding region having a sequence described in this section, e.g., in the context of a CAR.

[0156] In one aspect, the present disclosure provides a population of CAR-expressing cells, e.g., CART cells, comprising a mixture of cells expressing CD19 CARs and CD20 CARs. For example, in one embodiment, the population of CART cells can include a first cell expressing a CD19 CAR and a second cell expressing a CD20 CAR.

[0157] In some aspects, a binding domain or antibody molecule described herein binds the same (or substantially the same) or an overlapping (or substantially overlapping) epitope with a second antibody molecule to CD20, wherein the second antibody molecule is an antibody molecule described herein, e.g., an antibody molecule chosen from Tables 11A-15B. In some embodiments, a binding domain or antibody molecule described herein competes for binding, and/or binds the same (or substantially the same) or overlapping (or substantially overlapping) epitope, with a second antibody molecule to CD20, wherein the second antibody molecule is an antibody molecule described herein, e.g., an antibody molecule chosen from Tables 11A-15B, e.g., as determined by the methods described in Example 25. In some embodiments, a biparatopic CD20 binding domain binds a first epitope, e.g., an epitope bound by an antibody molecule chosen from Tables 11A-15B, and the biparatopic binding domain also binds a second epitope, e.g., a second epitope bound by an antibody molecule chosen from Tables 11A-15B. In some aspects, the present disclosure provides a method of treatment comprising administering a first CD20 binding domain that binds a first epitope, e.g., an epitope bound by an antibody molecule chosen from Tables 11A-15B and a second CD20 binding domain that binds a second epitope, e.g., a second epitope bound by an antibody molecule chosen from Tables 11A-15B. In some embodiments, the CD20 binding domains are part of CAR molecules, e.g., expressed by a CAR-expressing cell.

### CD22 Binding Domains and Inhibitors

[0158] In some aspects, the present disclosure provides a CD22 inhibitor or binding domain, e.g., a CD22 inhibitor or binding domain as described herein. The disclosure also provides a nucleic acid encoding the CD22 binding domain, e.g., encoding a CAR comprising the CD22 binding domain. The composition may also comprise a second agent, e.g., an anti-CD19 CAR-expressing cell or a CD19 binding domain. The agents may be, e.g., encoded by a single nucleic acid or different nucleic acids.

[0159] In some aspects, a CD22 inhibitor or binding domain is administered as a monotherapy. In some aspects, the CD22 inhibitor or binding domain is administered in combination with a second agent such as an anti-CD19 CAR-expressing cell.

[0160] The CD22 inhibitor may be, e.g., a small molecule, antibody or antigen-binding fragment thereof, a CAR or a CAR-expressing cell. In one embodiment, the CD22 inhibitor is an anti-CD22 antibody or fragment thereof. In an embodiment, the antibody is a monospecific antibody and in another embodiment the antibody is a bispecific antibody. In an embodiment, the antibody is a monospecific antibody, optionally conjugated to a second agent such as a chemotherapeutic agent. For instance, in an embodiment the antibody is an anti-CD22 monoclonal antibody-MMAE conjugate (e.g., DCDT2980S). In an embodiment, the antibody is an scFv of an anti-CD22 antibody, e.g., an scFv of antibody RFB4. This scFv can be fused to all of or a fragment of Pseudomonas exotoxin-A (e.g., BL22). In an embodiment, the antibody is a humanized anti-CD22 monoclonal antibody (e.g., epratuzumab). In an embodiment, the antibody or fragment thereof comprises the Fv portion of an anti-CD22 antibody, which is optionally covalently fused to all or a fragment or (e.g., a 38 KDa fragment of) Pseudomonas exotoxin-A (e.g., moxetumomab pasudotox). In an embodiment, the anti-CD22 antibody is an anti-CD19/CD22 bispecific antibody, optionally conjugated to a toxin. For instance, in one embodiment, the anti-CD22 antibody comprises an anti-CD19/CD22 bispecific portion, (e.g., two scFv ligands, recognizing human CD19 and CD22) optionally linked to all of or a portion of diphtheria toxin (DT), e.g., first 389 amino acids of diphtheria toxin (DT), DT 390, e.g., a ligand-directed toxin such as DT2219ARL). In another embodiment, the bispecific portion (e.g., anti-CD19/anti-CD22) is linked to a toxin such as deglycosylated ricin A chain (e.g., Combotox).

[0161] In one embodiment, the CD22 inhibitor is an anti-CD22 expressing cell, e.g., a CD22 CART or CD22-expressing NK cell.

[0162] In one aspect, the present disclosure provides a population of CAR-expressing cells, e.g., CART cells, comprising a mixture of cells expressing CD19 CARs and CD22 CARs. For example, in one embodiment, the population of CART cells can include a first cell expressing a CD19 CAR and a second cell expressing a CD22 CAR. As another example, the population of CAR T cells can include a single population expressing more than one, e.g., 2, 3, 4, 5, or 6 or more, CARs, e.g., a CD19 CAR and a CD22 CAR.

[0163] In some embodiments, the CD22-CAR comprises an optional leader sequence (e.g., an optional leader sequence described herein), an extracellular antigen binding domain, a hinge (e.g., hinge described herein), a transmembrane domain (e.g., transmembrane domain described herein), and an intracellular stimulatory domain (e.g., intracellular stimulatory domain described herein). In one embodiment, an exemplary CD22 CAR construct comprises an optional leader sequence (e.g., a leader sequence described herein), an extracellular antigen binding domain, a hinge, a transmembrane domain, an intracellular costimulatory domain (e.g., an intracellular costimulatory domain described herein) and an intracellular stimulatory domain.

[0164] In one embodiment, the CD22 binding domain comprises one or more (e.g., all three) light chain complementarity determining region 1 (LC CDR1), light chain complementarity determining region 2 (LC CDR2), and light chain complementarity determining region 3 (LC CDR3) of a CD22 binding domain described herein, and/or one or more (e.g., all three) heavy chain complementarity determining region 1 (HC CDR1), heavy chain complementarity determining region 2 (HC CDR2), and heavy chain complementarity determining region 3 (HC CDR3) of a CD22 binding domain described herein, e.g., a CD22 binding domain comprising one or more, e.g., all three, LC CDRs and one or more, e.g., all three, HC CDRs. These CDRs may be, e.g., one or more CDRs of Table 7A, 7B, 7C, 8A and/or 8B. In one embodiment, the CD22 binding domain comprises one or more (e.g., all three) heavy chain complementarity determining region 1 (HC CDR1), heavy chain complementarity determining region 2 (HC CDR2), and heavy chain complementarity determining region 3 (HC CDR3) of a CD22 binding domain described herein, e.g., the CD22 binding domain has two variable heavy chain regions, each comprising a HC CDR1, a HC CDR2 and a HC CDR3 described herein. In one embodiment, the CD22 binding domain comprises a light chain variable region described herein (e.g., in Table 10A or 10B) and/or a heavy chain variable region described herein (e.g., in Table 9A or 9B). In one embodiment, the CD22 binding domain comprises a heavy chain variable region described herein (e.g., in Table 9A or 9B), e.g., at least two heavy chain variable regions described herein (e.g., in Table 9A or 9B). In one embodiment, the CD22 binding domain is a scFv comprising a light chain and a heavy chain of an amino acid sequence of Table 9A or 9B and 10A or 10B. In an embodiment, the CD22 binding domain (e.g., an scFv) comprises: a light chain variable region comprising an amino acid sequence having at least one, two or three modifications (e.g., substitutions) but not more than 30, 20 or 10 modifications (e.g., substitutions) of an amino acid sequence of a light chain variable region provided in Table 10A or 10B, or a sequence with 95-99% identity with an amino acid sequence of Table 10A or 10B; and/or a heavy chain variable region comprising an amino acid sequence having at least one, two or three modifications (e.g., substitutions) but not more than 30, 20 or 10 modifications (e.g., substitutions) of an amino acid sequence of a heavy chain variable region provided in Table 9A or 9B, or a sequence with 95-99% identity to an amino acid sequence of Table 9A or 9B. The CD22 binding domain may be part of, e.g., an antibody molecule or a CAR molecule.

[0165] In one embodiment, the CAR molecule comprises an anti-CD22 binding domain that includes one or more (e.g., 2, 3, 4, 5, or 6) LC CDR1, LC CDR2, LC CDR3, HC CDR1, HC CDR2, and HC CDR3 of a construct of Table 7A, 7B, 7C, 8A and/or 8B, e.g., m971, CAR22-1, CAR22-2, CAR22-3, CAR22-4, CAR22-5, CAR22-6, CAR22-7, CAR22-8, CAR22-9, CAR22-10, CAR22-11, CAR22-12, CAR22-13, CAR22-14, CAR22-15, CAR22-16, CAR22-17, CAR22-18, CAR22-19, CAR22-20, CAR22-21, CAR22-22, CAR22-23, CAR22-24, CAR22-25, CAR22-26, CAR22-27, CAR22-28, CAR22-29, CAR22-30, CAR22-31, CAR22-32, CAR22-33, CAR22-34, CAR22-35, CAR22-36, CAR22-37, or CAR22-38.

[0166] In one embodiment, the CAR molecule comprises an anti-CD22 binding domain that includes a VL and/or VH of a construct of Table 9A, 9B, 10A, and/or 10B, e.g., m971, CAR22-1, CAR22-2, CAR22-3, CAR22-4, CAR22-5, CAR22-6, CAR22-7, CAR22-8, CAR22-9, CAR22-10, CAR22-11, CAR22-12, CAR22-13, CAR22-14, CAR22-15, CAR22-16, CAR22-17, CAR22-18, CAR22-19, CAR22-20, CAR22-21, CAR22-22, CAR22-23, CAR22-24, CAR22-25, CAR22-26, CAR22-27, CAR22-28, CAR22-29, CAR22-30, CAR22-31, CAR22-32, CAR22-33, CAR22-34, CAR22-35, CAR22-36, CAR22-37, or CAR22-38, or a sequence with 95-99% identity thereto.

[0167] The scFv may be preceded by an optional leader sequence such as provided in SEQ ID NO: 13, and followed by an optional hinge sequence such as provided in SEQ ID NO: 14 or SEQ ID NO:45 or SEQ ID NO:47 or SEQ ID NO:49, a transmembrane region such as provided in SEQ ID NO:15, an intracellular signalling domain that includes SEQ ID NO:16 or SEQ ID NO:51 and a CD3 zeta sequence that includes SEQ ID NO:17 or SEQ ID NO:43, e.g., wherein the domains are contiguous with and in the same reading frame to form a single fusion protein.

[0168] Further embodiments include a nucleotide sequence that encodes a polypeptide of any of Tables 6A-10B. Further embodiments include a nucleotide sequence that encodes a polypeptide of any of Tables 6A-10B, and each of the domains of SEQ ID NOS: 13, 14, 15, 16, 17, and optionally 51.

[0169] In one embodiment, the CD22 binding domain is characterized by particular functional features or properties of an antibody or antibody fragment. For example, in one embodiment, the portion of a CAR composition of the invention that comprises an antigen binding domain specifically binds human CD22 or a fragment thereof.

[0170] In one embodiment, the CD22 binding domain is a fragment, e.g., a single chain variable fragment (scFv). In one embodiments, the CD22 binding domain is a Fv, a Fab, a (Fab′)2, or a bi-functional (e.g. bi-specific) hybrid antibody (e.g., Lanzavecchia et al., Eur. J. Immunol. 17, 105 (1987)). In one aspect, the antibodies and fragments thereof of the invention binds a CD22 protein or a fragment thereof with wild-type or enhanced affinity. In some instances, a human scFv can be derived from a display library.

[0171] In one embodiment, the CD22 binding domain, e.g., scFv comprises at least one mutation such that the mutated scFv confers improved stability to the CART22 construct. In another embodiment, the CD22 binding domain, e.g., scFv comprises at least 1, 2, 3, 4, 5, 6, 7, 8, 9, 10 mutations arising, e.g., from the humanization process such that the mutated scFv confers improved stability to the CART22 construct.

[0172] In some embodiments, the CD22 inhibitor comprises an antibody molecule having, e.g., an antibody molecule having a CD22-binding sequence as described herein. For instance, the antibody molecule may comprise CDRs or a VH and VL as described in any of Tables 6A-10B, or a sequence with homology thereto, e.g., having 95-99% identity thereto. The antibody molecule may comprise a CD22-binding region having a sequence described in this section, e.g., in the context of a CAR.

[0173] In one embodiment, the present disclosure provides a population of CAR-expressing cells, e.g., CART cells, comprising a mixture of cells expressing CD19 CARs and CD22 CARs. For example, in one embodiment, the population of CART cells can include a first cell expressing a CD19 CAR and a second cell expressing a CD22 CAR.

[0174] In some aspects, a binding domain or antibody molecule described herein binds the same (or substantially the same) or an overlapping (or substantially overlapping) epitope with a second antibody molecule to CD22, wherein the second antibody molecule is an antibody molecule described herein, e.g., an antibody molecule chosen from Tables 6A-10B. In some embodiments, a binding domain or antibody molecule described herein competes for binding, and/or binds the same (or substantially the same) or overlapping (or substantially overlapping) epitope, with a second antibody molecule to CD22, wherein the second antibody molecule is an antibody molecule described herein, e.g., an antibody molecule chosen from Tables 6A-10B, e.g., as determined by the methods described in Example 25. In some embodiments, a biparatopic CD22 binding domain binds a first epitope, e.g., an epitope bound by an antibody molecule chosen from Tables 6A-10B, and the biparatopic binding domain also binds a second epitope, e.g., a second epitope bound by an antibody molecule chosen from Tables 6A-10B. In some aspects, the present disclosure provides a method of treatment comprising administering a first CD22 binding domain that binds a first epitope, e.g., an epitope bound by an antibody molecule chosen from Tables 6A-10B and a second CD22 binding domain that binds a second epitope, e.g., a second epitope bound by an antibody molecule chosen from Tables 6A-10B. In some embodiments, the CD22 binding domains are part of CAR molecules, e.g., expressed by a CAR-expressing cell.

[0175] In some embodiments, a CD22 binding domain binds to one or more of Ig-like domains 1, 2, 3, 4, 5, 6, or 7 of CD22. In some embodiments, the CD22 binding domain binds to domains 1 and 2; to domains 3 and 4; or to domains 5, 6, and 7. In some aspects, this disclosure provides a method of treating a CD19-negative cancer, e.g., a leukemia, e.g., an ALL, e.g., B-ALL, comprising administering a CD22 inhibitor, e.g., a CD22 binding domain or CD22 CAR-expressing cell described herein. In some embodiments, the method includes a step of determining whether the cancer is CD19-negative. In some embodiments, the subject has received a CD19 inhibitor, e.g., a CD19 CAR-expressing cell, and is resistant, relapsed, or refractory to the CD19 inhibitor.

### ROR1 Inhibitors

[0176] The ROR1 inhibitor may be, e.g., a small molecule, antibody, or fragment thereof. In one embodiment, the ROR1 inhibitor is an anti-ROR1 antibody or fragment thereof. In one embodiment, the anti-ROR1 antibody or fragment thereof is a monoclonal antibody, e.g., cirmtuzumab.

[0177] In one embodiment, the ROR1 inhibitor is an anti-ROR1 expressing cell, e.g., ROR1 CART or ROR1-expressing NK cell.

[0178] In some embodiments, the ROR1-CAR comprises an optional leader sequence (e.g., an optional leader sequence described herein), an extracellular antigen binding domain, a hinge (e.g., hinge described herein), a transmembrane domain (e.g., transmembrane domain described herein), and an intracellular stimulatory domain (e.g., intracellular stimulatory domain described herein). In one embodiment, an exemplary ROR1 CAR construct comprises an optional leader sequence (e.g., a leader sequence described herein), an extracellular antigen binding domain, a hinge, a transmembrane domain, an intracellular costimulatory domain (e.g., an intracellular costimulatory domain described herein) and an intracellular stimulatory domain.

[0179] In one embodiment the ROR1 binding domain comprises an scFv portion, e.g., a human scFv portion. The scFv the scFv may be preceded by an optional leader sequence such as provided in SEQ ID NO: 13, and followed by an optional hinge sequence such as provided in SEQ ID NO: 14 or SEQ ID NO:45 or SEQ ID NO:47 or SEQ ID NO:49, a transmembrane region such as provided in SEQ ID NO:15, an intracellular signalling domain that includes SEQ ID NO:16 or SEQ ID NO:51 and a CD3 zeta sequence that includes SEQ ID NO:17 or SEQ ID NO:43, e.g., wherein the domains are contiguous with and in the same reading frame to form a single fusion protein.

[0180] In some embodiments, the present disclosure encompasses a recombinant nucleic acid construct comprising a nucleic acid molecule encoding a ROR1 CAR, wherein the nucleic acid molecule comprises the nucleic acid sequence encoding a ROR1 binding domain, e.g., described herein, e.g., that is contiguous with and in the same reading frame as a nucleic acid sequence encoding an intracellular signaling domain. An exemplary intracellular signaling domain that can be used in the CAR includes, but is not limited to, one or more intracellular signaling domains of, e.g., CD3-zeta, CD28, 4-1BB, and the like. In some instances, the CAR can comprise any combination of CD3-zeta, CD28, 4-1BB, and the like.

[0181] In one embodiment, the ROR1 binding domain is characterized by particular functional features or properties of an antibody or antibody fragment. For example, in one embodiment, the portion of a CAR composition of the invention that comprises an antigen binding domain specifically binds human ROR1 or a fragment thereof. In certain embodiments, the scFv is contiguous with and in the same reading frame as a leader sequence. In one aspect the leader sequence is the polypeptide sequence provided as SEQ ID NO:13.

[0182] In one embodiment, the ROR1 binding domain is a fragment, e.g., a single chain variable fragment (scFv). In one embodiments, the ROR1 binding domain is a Fv, a Fab, a (Fab′)2, or a bi-functional (e.g. bi-specific) hybrid antibody (e.g., Lanzavecchia et al., Eur. J. Immunol. 17, 105 (1987)). In one aspect, the antibodies and fragments thereof of the invention binds a ROR1 protein or a fragment thereof with wild-type or enhanced affinity. In some instances, a human scFv can be derived from a display library.

[0183] In one embodiment, the ROR1 binding domain, e.g., scFv comprises at least one mutation such that the mutated scFv confers improved stability to the ROR1 CART construct. In another embodiment, the ROR1 binding domain, e.g., scFv comprises at least 1, 2, 3, 4, 5, 6, 7, 8, 9, 10 mutations arising from the humanization process such that the mutated scFv confers improved stability to the ROR1 CART construct.

[0184] In one embodiment, the present disclosure provides a population of CAR-expressing cells, e.g., CART cells, comprising a mixture of cells expressing CD19 CARs and ROR1 CARs. For example, in one embodiment, the population of CART cells can include a first cell expressing a CD19 CAR and a second cell expressing a ROR1 CAR.

### CD123 Inhibitors

[0185] The CD123 inhibitor may be, e.g., a small molecule, antibody, or fragment thereof (e.g., a monospecific or bispecific antibody or fragment thereof); a recombinant protein, e.g., fusion protein, that binds to CD123; inhibitory nucleic acid; or a cell expressing a CD123 CAR, e.g., a CD123 CART.

[0186] In one embodiment, the CD123 inhibitor is a recombinant protein, e.g., comprising the natural ligand (or a fragment) of the CD123 receptor, e.g., SL-401 (also called DT3881L3; University of Texas Southwestern Medical Center).

[0187] In another embodiment, the CD123 inhibitor is an anti-CD123 antibody or fragment thereof, e.g., a monoclonal antibody (e.g., a monospecific or bispecific antibody or fragment thereof), such as CSL360 (CSL Limited), CSL362 (CSL Limited), or MGD006 (MacroGenics).

[0188] In one embodiment, the CD123 inhibitor is an anti-CD123 CAR expressing cell, e.g., CD123 CART or CD123 CAR-expressing NK cell.

[0189] In some embodiments, the CD123-CAR comprises an optional leader sequence (e.g., an optional leader sequence described herein), an extracellular antigen binding domain, a hinge (e.g., hinge described herein), a transmembrane domain (e.g., transmembrane domain described herein), and an intracellular stimulatory domain (e.g., intracellular stimulatory domain described herein). In one embodiment, an exemplary CD123 CAR construct comprises an optional leader sequence (e.g., a leader sequence described herein), an extracellular antigen binding domain, a hinge, a transmembrane domain, an intracellular costimulatory domain (e.g., an intracellular costimulatory domain described herein) and an intracellular stimulatory domain.

[0190] In one embodiment, the CD123 binding domain comprises one or more (e.g., all three) light chain complementarity determining region 1 (LC CDR1), light chain complementarity determining region 2 (LC CDR2), and light chain complementarity determining region 3 (LC CDR3) of a CD20 binding domain described herein, and/or one or more (e.g., all three) heavy chain complementarity determining region 1 (HC CDR1), heavy chain complementarity determining region 2 (HC CDR2), and heavy chain complementarity determining region 3 (HC CDR3) of a CD123 binding domain described herein, e.g., a CD123 binding domain comprising one or more, e.g., all three, LC CDRs and one or more, e.g., all three, HC CDRs. These CDRs may be, e.g., those of any of Tables 17, 18, 26, or 27. In one embodiment, the CD123 binding domain comprises one or more (e.g., all three) heavy chain complementarity determining region 1 (HC CDR1), heavy chain complementarity determining region 2 (HC CDR2), and heavy chain complementarity determining region 3 (HC CDR3) of a CD123 binding domain described herein, e.g., the CD123 binding domain has two variable heavy chain regions, each comprising a HC CDR1, a HC CDR2 and a HC CDR3 described herein. In one embodiment, the CD123 binding domain comprises a light chain variable region described herein and/or a heavy chain variable region described herein. In one embodiment, the CD123 binding domain comprises a heavy chain variable region described herein, e.g., at least two heavy chain variable regions described herein. In one embodiment, the CD123 binding domain is a scFv comprising a light chain and a heavy chain of an amino acid sequence of Table 16 or 25. In an embodiment, the CD123 binding domain (e.g., an scFv) comprises: a light chain variable region comprising an amino acid sequence having at least one, two or three modifications (e.g., substitutions) but not more than 30, 20 or 10 modifications (e.g., substitutions) of an amino acid sequence of a light chain variable region in Table 16 or 25, or a sequence with 95-99% identity with a light chain variable region in Table 16 or 25; and/or a heavy chain variable region comprising an amino acid sequence having at least one, two or three modifications (e.g., substitutions) but not more than 30, 20 or 10 modifications (e.g., substitutions) of an amino acid sequence of a heavy chain variable region in Table 16 or 25, or a sequence with 95-99% identity to a heavy chain variable region in Table 16 or 25.

[0191] In one embodiment, the CAR molecule comprises an anti-CD123 binding domain that includes one or more (e.g., 2, 3, 4, 5, or 6) LC CDR1, LC CDR2, LC CDR3, HC CDR1, HC CDR2, and HC CDR3 of a construct of Table 17 and 18, e.g., CAR123-1, CAR123-2, CAR123-3, or CAR123-4. In one embodiment, the CAR molecule comprises an anti-CD123 binding domain that includes one or more (e.g., 2, 3, 4, 5, or 6) LC CDR1, LC CDR2, LC CDR3, HC CDR1, HC CDR2, and HC CDR3 of a construct of Table 26 and 27, e.g., hzCAR123.

[0192] The CD123 scFv may be preceded by an optional leader sequence such as provided in SEQ ID NO: 13, and followed by an optional hinge sequence such as provided in SEQ ID NO: 14 or SEQ ID NO:45 or SEQ ID NO:47 or SEQ ID NO:49, a transmembrane region such as provided in SEQ ID NO:15, an intracellular signalling domain that includes SEQ ID NO:16 or SEQ ID NO:51 and a CD3 zeta sequence that includes SEQ ID NO:17 or SEQ ID NO:43, e.g., wherein the domains are contiguous with and in the same reading frame to form a single fusion protein.

[0193] Further embodiments include a nucleotide sequence that encodes a polypeptide of any of Tables 16-27. Further embodiments include a nucleotide sequence that encodes a polypeptide any of Tables 16-27, and each of the domains of SEQ ID NOS: 13, 14, 15, 16, 17, and optionally 51.

[0194] In one embodiment, the CD123 binding domain is characterized by particular functional features or properties of an antibody or antibody fragment. For example, in one embodiment, the portion of a CAR composition of the invention that comprises an antigen binding domain specifically binds human CD123 or a fragment thereof.

[0195] In one embodiment, the CD123 binding domain is a fragment, e.g., a single chain variable fragment (scFv). In one embodiments, the CD123 binding domain is a Fv, a Fab, a (Fab′)2, or a bi-functional (e.g. bi-specific) hybrid antibody (e.g., Lanzavecchia et al., Eur. J. Immunol. 17, 105 (1987)). In one aspect, the antibodies and fragments thereof of the invention binds a CD123 protein or a fragment thereof with wild-type or enhanced affinity. In some instances, a human scFv can be derived from a display library.

[0196] In one embodiment, the CD123 binding domain, e.g., scFv comprises at least one mutation such that the mutated scFv confers improved stability to the CART123 construct. In another embodiment, the CD123 binding domain, e.g., scFv comprises at least 1, 2, 3, 4, 5, 6, 7, 8, 9, 10 mutations arising, e.g., from the humanization process, such that the mutated scFv confers improved stability to the CART123 construct.

[0197] In some embodiments, the CD123 inhibitor comprises an antibody molecule, e.g., an antibody molecule having a CD123-binding sequence as described herein. For instance, the antibody molecule may comprise CDRs or a VH and VL as described in any of Tables 16-27, or a sequence with homology thereto, e.g., having 95-99% identity thereto. The antibody molecule may comprise a CD123-binding region having a sequence described in this section, e.g., in the context of a CAR.

[0198] In one embodiment, the present disclosure provides a population of CAR-expressing cells, e.g., CART cells, comprising a mixture of cells expressing CD19 CARs and CD123 CARs. For example, in one embodiment, the population of CART cells can include a first cell expressing a CD19 CAR and a second cell expressing a CD123 CAR.

### CD10 Inhibitors

[0199] The CD10 inhibitor may be, e.g., a small molecule, antibody, or fragment thereof (e.g., a monospecific or bispecific antibody or fragment thereof); a recombinant protein, e.g., fusion protein, that binds to CD10; inhibitory nucleic acid; or a cell expressing a CD10 CAR, e.g., a CD10 CART.

[0200] In an embodiment, the CD10 inhibitor comprises a small molecule, such as sacubitril (Novartis), valsartan/sacubritril (Novartis), omapatrilat (Bristol-Myers Squibb), RB-101, UK-414,495 (Pfizer), or a pharmaceutically acceptable salt or a derivative thereof.

[0201] In one embodiment, the CD10 inhibitor is an anti-CD10 CAR expressing cell, e.g., CD10 CART or CD10 CAR-expressing NK cell.

[0202] In one embodiment, the present disclosure provides a population of CAR-expressing cells, e.g., CART cells, comprising a mixture of cells expressing CD19 CARs and CD10 CARs. For example, in one embodiment, the population of CART cells can include a first cell expressing a CD19 CAR and a second cell expressing a CD10 CAR.

### CD34 Inhibitors

[0203] The CD34 inhibitor may be, e.g., a small molecule, antibody, or fragment thereof (e.g., a monospecific or bispecific antibody or fragment thereof); a recombinant protein, e.g., fusion protein, that binds to CD34; inhibitory nucleic acid; or a cell expressing a CD34 CAR, e.g., a CD34 CART.

[0204] In an embodiment, the CD34 inhibitor comprises a monoclonal antibody or fragment thereof that targets CD34 or an immunoliposome comprising an anti-CD34 monoclonal antibody or fragment thereof.

[0205] In one embodiment, the CD34 inhibitor is an anti-CD34 CAR-expressing cell, e.g., CD34 CART or CD34 CAR-expressing NK cell.

[0206] In one embodiment, the present disclosure provides a population of CAR-expressing cells, e.g., CART cells, comprising a mixture of cells expressing CD19 CARs and CD34 CARs. For example, in one embodiment, the population of CART cells can include a first cell expressing a CD19 CAR and a second cell expressing a CD34 CAR.

### FLT-3 Inhibitors

[0207] The FLT-3 inhibitor may be, e.g., a small molecule, antibody, or fragment thereof (e.g., a monospecific or bispecific antibody or fragment thereof); a recombinant protein, e.g., fusion protein, that binds to FLT-3; inhibitory nucleic acid; or a cell expressing a FLT-3 CAR, e.g., a FLT-3 CART.

[0208] In some embodiments, the FLT-3 inhibitor comprises a small molecule, such as quizartinib (Ambit Biosciences), midostaurin (Technische Universitat Dresden), sorafenib (Bayer and Onyx Pharmaceuticals), sunitinib (Pfizer), lestaurtinib (Cephalon), or a pharmaceutically acceptable salt or derivative thereof.

[0209] In one embodiment, the FLT-3 inhibitor is an anti-FLT-3 CAR expressing cell, e.g., FLT-3 CART or FLT-3 CAR-expressing NK cell.

[0210] In one embodiment, the present disclosure provides a population of CAR-expressing cells, e.g., CART cells, comprising a mixture of cells expressing CD19 CARs and FLT-3 CARs. For example, in one embodiment, the population of CART cells can include a first cell expressing a CD19 CAR and a second cell expressing a FLT-3 CAR.

### CD79b Inhibitors

[0211] In certain embodiments, the CD19 CAR-expressing cell is administered with a CD79b inhibitor. The CD79b inhibitor can be, e.g., a small molecule, antibody, or fragment thereof (e.g., a monospecific or bispecific antibody or fragment thereof); a recombinant protein, e.g., fusion protein, that binds to CD79b; inhibitory nucleic acid; or a cell expressing a CD79b CAR, e.g., a CD79b CAR-expressing T cell or NK cell. In one embodiment, the CD79b inhibitor is an anti-CD79b CAR expressing cell, e.g., CD79b CART or CD79b CAR-expressing NK cell. Exemplary CD79b inhibitors are described in more detail below.

[0212] In an embodiment, the present disclosure provides a population of CAR-expressing cells, e.g., CART cells or CAR-expressing NK cells, comprising a mixture of cells expressing CD19 CARs and CD79b CARs. For example, in one embodiment, the population of CAR-expressing cells includes a first cell expressing a CD19 CAR and a second cell expressing a CD79b CAR.

### CD179b Inhibitors

[0213] In certain embodiments, the CD19 CAR-expressing cell is administered with a CD179b inhibitor. The CD179b inhibitor can be, e.g., a small molecule, antibody, or fragment thereof (e.g., a monospecific or bispecific antibody or fragment thereof); a recombinant protein, e.g., fusion protein, that binds to CD179b; inhibitory nucleic acid; or a cell expressing a CD179b CAR, e.g., a CD179b CAR-expressing T cell or NK cell. In one embodiment, the CD79b inhibitor is an anti-CD179b CAR expressing cell, e.g., CD179b CART or CD179b CAR-expressing NK cell. Exemplary CD179b inhibitors are described in more detail below.

[0214] In an embodiment, the present disclosure provides a population of CAR-expressing cells, e.g., CART cells or CAR-expressing NK cells, comprising a mixture of cells expressing CD19 CARs and CD179b CARs. For example, in one embodiment, the population of CAR-expressing cells includes a first cell expressing a CD20 CAR and a second cell expressing a CD179b CAR.

### C79a Inhibitors

[0215] In certain embodiments, the CD19 CAR-expressing cell is administered with a CD79a inhibitor. The CD79a inhibitor can be, e.g., a small molecule, antibody, or fragment thereof (e.g., a monospecific or bispecific antibody or fragment thereof); a recombinant protein, e.g., fusion protein, that binds to CD79a; inhibitory nucleic acid; or a cell expressing a CD79a CAR, e.g., a CD79a CAR-expressing T cell or NK cell. In one embodiment, the CD79a inhibitor is an anti-CD79a CAR expressing cell, e.g., CD79a CART or CD79a CAR-expressing NK cell. Exemplary CD79a inhibitors are described in more detail below.

[0216] In an embodiment, the present disclosure provides a population of CAR-expressing cells, e.g., CART cells or CAR-expressing NK cells, comprising a mixture of cells expressing CD19 CARs and CD79a CARs. For example, in one embodiment, the population of CAR-expressing cells includes a first cell expressing a CD19 CAR and a second cell expressing a CD79a CAR.

### Car Molecules

[0217] The binding domains described herein (e.g., binding domains against one or more of CD10, CD20, CD22, CD34, CD123, FLT-3, ROR1, CD79b, CD179b, or CD79a) may further comprise one or more additional amino acid sequences.

[0218] In one embodiment, the CAR molecule comprises a transmembrane domain of a protein selected from the group consisting of the alpha, beta or zeta chain of the T-cell receptor, CD28, CD3 epsilon, CD45, CD4, CD5, CD8, CD9, CD16, CD22, CD33, CD37, CD64, CD80, CD86, CD134, CD137 and CD154. In one embodiment, the transmembrane domain comprises a sequence of SEQ ID NO: 15. In one embodiment, the transmembrane domain comprises an amino acid sequence having at least one, two or three modifications (e.g., substitutions) but not more than 20, 10 or 5 modifications (e.g., substitutions) of an amino acid sequence of SEQ ID NO: 15, or a sequence with 95-99% identity to an amino acid sequence of SEQ ID NO: 15.

[0219] In one embodiment, the binding domain is connected to the transmembrane domain by a hinge region, e.g., a hinge region described herein. In one embodiment, the encoded hinge region comprises SEQ ID NO:14 or SEQ ID NO:45, or a sequence with 95-99% identity thereof.

[0220] In one embodiment, the CAR molecule further comprises a sequence encoding a costimulatory domain, e.g., a costimulatory domain described herein. In one embodiment, the costimulatory domain comprises a functional signaling domain of a protein selected from the group consisting of OX40, CD2, CD27, CD28, ICAM-1, LFA-1 (CD11a/CD18), ICOS (CD278), and 4-1BB (CD137). In one embodiment, the costimulatory domain comprises a sequence of SEQ ID NO: 16. In one embodiment, the costimulatory domain comprises a sequence of SEQ ID NO:51. In one embodiment, the costimulatory domain comprises an amino acid sequence having at least one, two or three modifications (e.g., substitutions) but not more than 20, 10 or 5 modifications (e.g., substitutions) of an amino acid sequence of SEQ ID NO: 16 or SEQ ID NO:51, or a sequence with 95-99% identity to an amino acid sequence of SEQ ID NO: 16 or SEQ ID NO:51. In one embodiment, the costimulatory domain comprises a functional signaling domain of a protein selected from the group consisting of MHC class I molecule, TNF receptor proteins, Immunoglobulin-like proteins, cytokine receptors, integrins, signaling lymphocytic activation molecules (SLAM proteins), activating NK cell receptors, BTLA, a Toll ligand receptor, OX40, CD2, CD7, CD27, CD28, CD30, CD40, ICAM-1, LFA-1 (CD11a/CD18), 4-1BB (CD137), B7-H3, ICAM-1, ICOS (CD278), GITR, BAFFR, LIGHT, HVEM (LIGHTR), KIRDS2, SLAMF7, NKp80 (KLRF1), NKp44, NKp30, NKp46, CD19, CD4, CD8alpha, CD8beta, IL2R beta, IL2R gamma, IL7R alpha, ITGA4, VLA1, CD49a, ITGA4, IA4, CD49D, ITGA6, VLA-6, CD49f, ITGAD, CD11d, ITGAE, CD103, ITGAL, CD11a, LFA-1, ITGAM, CD11b, ITGAX, CD11c, ITGB1, CD29, ITGB2, CD18, LFA-1, ITGB7, NKG2D, NKG2C, TNFR2, TRANCE/RANKL, DNAM1 (CD226), SLAMF4 (CD244, 2B4), CD84, CD96 (Tactile), CEACAM1, CRTAM, Ly9 (CD229), CD160 (BY55), PSGL1, CD100 (SEMA4D), CD69, SLAMF6 (NTB-A, Ly108), SLAM (SLAMF1, CD150, IPO-3), BLAME (SLAMF8), SELPLG (CD162), LTBR, LAT, GADS, SLP-76, PAG/Cbp, CD19a, and a ligand that specifically binds with CD83. In embodiments, the costimulatory domain comprises 4-1BB, CD27, CD28, or ICOS.

[0221] In one embodiment, the CAR molecule further comprises a sequence encoding an intracellular signaling domain, e.g., an intracellular signaling domain described herein. In one embodiment, the intracellular signaling domain comprises a functional signaling domain of 4-1BB and/or a functional signaling domain of CD3 zeta. In one embodiment, the intracellular signaling domain comprises the sequence of SEQ ID NO: 16 and/or the sequence of SEQ ID NO:17. In one embodiment, the intracellular signaling domain comprises the sequence of SEQ ID NO:16 and/or the sequence of SEQ ID NO:43. In one embodiment, the intracellular signaling domain comprises a functional signaling domain of CD27 and/or a functional signaling domain of CD3 zeta. In one embodiment, the intracellular signaling domain comprises the sequence of SEQ ID NO: 51 and/or the sequence of SEQ ID NO:17. In one embodiment, the intracellular signaling domain comprises the sequence of SEQ ID NO:51 and/or the sequence of SEQ ID NO:43. In one embodiment, the intracellular signaling domain comprises an amino acid sequence having at least one, two or three modifications (e.g., substitutions) but not more than 20, 10 or 5 modifications (e.g., substitutions) of an amino acid sequence of SEQ ID NO:16 or SEQ ID NO:51 and/or an amino acid sequence of SEQ ID NO:17 or SEQ ID NO:43, or a sequence with 95-99% identity to an amino acid sequence of SEQ ID NO:16 or SEQ ID NO:51 and/or an amino acid sequence of SEQ ID NO:17 or SEQ ID NO:43. In one embodiment, the intracellular signaling domain comprises the sequence of SEQ ID NO:16 or SEQ ID NO:51 and the sequence of SEQ ID NO: 17 or SEQ ID NO:43, wherein the sequences comprising the intracellular signaling domain are expressed in the same frame and as a single polypeptide chain.

[0222] In one embodiment, the CAR molecule further comprises a leader sequence, e.g., a leader sequence described herein. In one embodiment, the leader sequence comprises an amino acid sequence of SEQ ID NO: 13, or a sequence with 95-99% identity to an amino acid sequence of SEQ ID NO:13.

[0223] In one aspect, the CAR (e.g., a CD19 CAR, a ROR1 CAR, a CD20 CAR, a CD22 CAR, a CD123 CAR, a CD10 CAR, a CD34 CAR, a FLT-3 CAR, a CD79b CAR, a CD179b CAR, or a CD79a CAR) comprises an optional leader sequence (e.g., an optional leader sequence described herein), an extracellular antigen binding domain, a hinge (e.g., hinge described herein), a transmembrane domain (e.g., transmembrane domain described herein), and an intracellular stimulatory domain (e.g., intracellular stimulatory domain described herein). In one aspect an exemplary CAR construct comprises an optional leader sequence (e.g., a leader sequence described herein), an extracellular antigen binding domain, a hinge, a transmembrane domain, an intracellular costimulatory domain (e.g., an intracellular costimulatory domain described herein) and an intracellular stimulatory domain.

### Bispecific Antibodies

[0224] A bispecific antibody molecule (which can be, e.g., administered alone or as a portion of a CAR) can comprise two VH regions and two VL regions. In some embodiments, the upstream antibody or portion thereof (e.g. scFv) is arranged with its VH (VH₁) upstream of its VL (VL₁) and the downstream antibody or portion thereof (e.g. scFv) is arranged with its VL (VL₂) upstream of its VH (VH₂), such that the overall bispecific antibody molecule has the arrangement VH₁-VL₁-VL₂-VH₂. In other embodiments, the upstream antibody or portion thereof (e.g. scFv) is arranged with its VL (VL₁) upstream of its VH (VH₁) and the downstream antibody or portion thereof (e.g. scFv) is arranged with its VH (VH₂) upstream of its VL (VL₂), such that the overall bispecific antibody molecule has the arrangement VL₁-VH₁-VH₂-VL₂.

### Bispecific CD22/CD19 Inhibitors

[0225] In an embodiment, the B-cell inhibitor comprises a bispecific CAR19/CAR22 antibody molecule. For instance, in some embodiments, the B-cell inhibitor comprises one or more amino acid sequences of Table 28, or a sequence having 95-99% identity thereto. Further provided are nucleic acids according to Table 28, or a sequence having 95-99% identity thereto. In an embodiment, the B-cell inhibitor comprises a CD19-specific antibody molecule of Table 2 or 3 (or a sequence having 95-99% identity thereto) and a CD22-specific antibody molecule of Table 6A or 6B (or a sequence having 95-99% identity thereto). In an embodiment, the B-cell inhibitor comprises a CD19-specific antibody molecule having one or more CDRs of Table 4 or 5 (or a sequence having 1, 2, 3, 4, 5, or 6 alterations e.g., substitutions thereto) and a CD22-specific antibody molecule having CDRs of Table 7A, 7B, 7C, 8A or 8B (or a sequence having 1, 2, 3, 4, 5, or 6 alterations e.g., substitutions thereto).

mTOR Inhibitors

[0226] In one embodiment, the cells expressing a CAR molecule, e.g., a CD19 CAR molecule, a CD20 CAR molecule, or a CD22 CAR molecule e.g., a CAR molecule described herein, optionally administered in combination with a B-cell inhibitor, are co-administered with a low, immune enhancing dose of an mTOR inhibitor. While not wishing to be bound by theory, it is believed that treatment with a low, immune enhancing, dose (e.g., a dose that is insufficient to completely suppress the immune system but sufficient to improve immune function) is accompanied by a decrease in PD-1 positive T cells or an increase in PD-1 negative cells. PD-1 positive T cells, but not PD-1 negative T cells, can be exhausted by engagement with cells which express a PD-1 ligand, e.g., PD-L1 or PD-L2.

[0227] In an embodiment this approach can be used to optimize the performance of CAR cells described herein in the subject. While not wishing to be bound by theory, it is believed that, in an embodiment, the performance of endogenous, non-modified immune effector cells, e.g., T cells, is improved. While not wishing to be bound by theory, it is believed that, in an embodiment, the performance of a CAR expressing cell is improved. In other embodiments, cells, e.g., T cells, which have, or will be engineered to express a CAR, can be treated ex vivo by contact with an amount of an mTOR inhibitor that increases the number of PD1 negative immune effector cells, e.g., T cells or increases the ratio of PD1 negative immune effector cells, e.g., T cells/PD1 positive immune effector cells, e.g., T cells.

[0228] In an embodiment, administration of a low, immune enhancing, dose of an mTOR inhibitor, e.g., an allosteric inhibitor, e.g., RAD001, or a catalytic inhibitor, is initiated prior to administration of an CAR expressing cell described herein, e.g., T cells. In an embodiment, the CAR cells are administered after a sufficient time, or sufficient dosing, of an mTOR inhibitor, such that the level of PD1 negative immune effector cells, e.g., T cells, or the ratio of PD1 negative immune effector cells, e.g., T cells/PD1 positive immune effector cells, e.g., T cells, has been, at least transiently, increased.

[0229] In an embodiment, the cell, e.g., T cell, to be engineered to express a CAR, is harvested after a sufficient time, or after sufficient dosing of the low, immune enhancing, dose of an mTOR inhibitor, such that the level of PD1 negative immune effector cells, e.g., T cells, or the ratio of PD1 negative immune effector cells, e.g., T cells/PD1 positive immune effector cells, e.g., T cells, in the subject or harvested from the subject has been, at least transiently, increased.

[0230] Additional features or embodiments of the compositions or methods described herein include one or more of the following:

[0231] In embodiments, the B-cell inhibitor comprises an inhibitor of one or more of CD10, CD20, CD22, CD34, CD123, FLT-3, or ROR1. In embodiments, the B-cell inhibitor comprises an effective number of one or more cells that express a CAR molecule that binds one or more of CD10, CD20, CD22, CD34, CD123, FLT-3, or ROR1.

[0232] In embodiments, the one or more cells that express a CAR molecule that binds CD19 are administered concurrently with, before, or after the one or more B-cell inhibitors.

[0233] In embodiments, the subject has or is identified as having a difference, e.g., a statistically significant difference, between a determined level compared to a reference level of one or more markers listed in Table 29 in a biological sample.

[0234] In embodiments, the subject has or is identified as having a difference between a determined characteristic compared to a reference characteristic, in a characteristic of CD19, e.g., a mutation causing a frameshift or a premature stop codon or both, in a biological sample.

[0235] In embodiments, the subject has or is identified as having a difference, e.g., a statistically significant difference, between a determined level compared to a reference level of Treg cells in a biological sample.

[0236] In an embodiment, the method comprises administering to the subject a therapeutically effective dose of a chimeric antigen receptor (CAR) therapy, e.g., a CAR therapy as described herein, e.g., a therapy comprising a CD19 CAR-expressing cell and optionally one or more B-cell inhibitor, and if the subject is identified as having a difference, e.g., a statistically significant difference, between a determined level compared to a reference level, or a determined characteristic compared to a reference characteristic, in one or more of (i) a level or activity of one or more markers listed in Table 29; (ii) a characteristic of CD19, e.g., a mutation, e.g., a mutation causing a frameshift or a premature stop codon or both, or (iii) a level of MEG cells in a biological sample. In an embodiment, the method comprises determining if the subject has a difference, e.g., a statistically significant difference, between a determined level compared to a reference level, or a determined characteristic compared to a reference characteristic, in one or more of (i) a level of one or more markers listed in Table 29; (ii) a characteristic of CD19, e.g., a mutation, e.g., a mutation causing a frameshift or a premature stop codon or both, or (iii) a level or activity of MEG cells in a biological sample, and administering to the subject a therapeutically effective dose of a chimeric antigen receptor (CAR) therapy, e.g., a CAR therapy as described herein, e.g., a therapy comprising a CD19 CAR-expressing cell and optionally one or more B-cell inhibitor. In an embodiment, the method comprises determining if the subject has a difference, e.g., a statistically significant difference, between a determined level compared to a reference level, or a determined characteristic compared to a reference characteristic, in one or more of (i) a level of one or more markers listed in Table 29; (ii) a characteristic of CD19, e.g., a mutation, e.g., a mutation causing a frameshift or a premature stop codon or both, or (iii) a level or activity of T_{REG} cells in a biological sample, and administering to the subject a therapeutically effective dose of a chimeric antigen receptor (CAR) therapy, e.g., a CAR therapy as described herein, e.g., a therapy comprising a CD19 CAR-expressing cell and optionally one or more B-cell inhibitor. In an embodiment, the method comprises administering to a subject a therapeutically effective dose of a chimeric antigen receptor (CAR) therapy, e.g., a CAR therapy as described herein, e.g., a therapy comprising a CD19 CAR-expressing cell, determining if the subject has a difference, e.g., a statistically significant difference, between a determined level compared to a reference level, or a determined characteristic compared to a reference characteristic, in one or more of (i) a level of one or more markers listed in Table 29; (ii) a characteristic of CD19, e.g., a mutation, e.g., a mutation causing a frameshift or a premature stop codon or both, or (iii) a level or activity of MEG cells in a biological sample, and if the difference is present, administering to a subject a therapeutically effective dose of one or more B-cell inhibitor.

[0237] In embodiments, the subject has or is identified as having an increase, e.g., a statistically significant increase, between a determined level and to a reference level of Treg cells in a biological sample.

[0238] In embodiments, the subject has relapsed or is identified as having relapsed after treatment with the one or more cells that express a CAR molecule that binds CD19, e.g., a CD19 CAR.

[0239] In embodiments, the B-cell inhibitor comprises an effective number of one or more cells that express: a CAR molecule that binds CD10, e.g., a CD10 CAR as described herein; a CAR molecule that binds CD20, e.g., a CD20 CAR as described herein; a CAR molecule that binds CD22, e.g., a CD22 CAR as described herein; a CAR molecule that binds CD34, e.g., a CD34 CAR as described herein; a CAR molecule that binds CD123, e.g., a CD123 CAR as described herein; a CAR molecule that binds FLT-3, e.g., a FLT-3 CAR as described herein; or a CAR molecule that binds ROR1, e.g., an ROR1 CAR as described herein.

[0240] In embodiments, the CD19 inhibitor comprises an antibody or antibody fragment which includes a CD19 binding domain, a transmembrane domain, and an intracellular signaling domain comprising a stimulatory domain, and wherein said CD19 binding domain comprises one or more of (e.g., all three of) light chain complementarity determining region 1 (LC CDR1), light chain complementarity determining region 2 (LC CDR2), and light chain complementarity determining region 3 (LC CDR3) of any CD19 light chain binding domain amino acid sequence listed in Tables 2 or 3, and one or more of (e.g., all three of) heavy chain complementarity determining region 1 (HC CDR1), heavy chain complementarity determining region 2 (HC CDR2), and heavy chain complementarity determining region 3 (HC CDR3) of any CD19 heavy chain binding domain amino acid sequence listed in Tables 2 or 3.

[0241] In embodiments, a CD19 CAR comprises light chain variable region listed in Tables 2 or 3 and any heavy chain variable region listed Tables 2 or 3.

[0242] In embodiments, the CD19 inhibitor comprises a CD19 binding domain which comprises a sequence selected from a group consisting of SEQ ID NO:1, SEQ ID NO:2, SEQ ID NO:3, SEQ ID NO: 4, SEQ ID NO:5, SEQ ID NO:6, SEQ ID NO:7, SEQ ID NO:8, SEQ ID NO:9, SEQ ID NO:10, SEQ ID NO:11 and SEQ ID NO:12, or a sequence with 95-99% identity thereof. In embodiments, the CD19 CAR comprises a polypeptide of SEQ ID NO:58.

[0243] In embodiments, the B-cell inhibitor comprises a CD20 CAR which comprises an antibody or antibody fragment which includes a CD20 binding domain, a transmembrane domain, and an intracellular signaling domain comprising a stimulatory domain, and wherein said CD20 binding domain comprises one or more of light chain complementarity determining region 1 (LC CDR1), light chain complementarity determining region 2 (LC CDR2), and light chain complementarity determining region 3 (LC CDR3) of any CD20 light chain binding domain amino acid sequence listed in Table 13, and one or more of heavy chain complementarity determining region 1 (HC CDR1), heavy chain complementarity determining region 2 (HC CDR2), and heavy chain complementarity determining region 3 (HC CDR3) of any CD20 heavy chain binding domain amino acid sequence listed in Table 12A or 12B.

[0244] In embodiments, the B-cell inhibitor comprises a CD22 CAR which comprises an antibody or antibody fragment which includes a CD22 binding domain, a transmembrane domain, and an intracellular signaling domain comprising a stimulatory domain, and wherein said CD22 binding domain comprises one or more of light chain complementarity determining region 1 (LC CDR1), light chain complementarity determining region 2 (LC CDR2), and light chain complementarity determining region 3 (LC CDR3) of any CD22 light chain binding domain amino acid sequence listed in Table 8A, 8B, 10A and/or 10B, and one or more of heavy chain complementarity determining region 1 (HC CDR1), heavy chain complementarity determining region 2 (HC CDR2), and heavy chain complementarity determining region 3 (HC CDR3) of any CD22 heavy chain binding domain amino acid sequence listed in Table 7A, 7B, 7C, 9A, and/or 9B.

[0245] In embodiments, the CD22 CAR comprises any light chain variable region listed in Table 10A or 10B. In embodiments, the CD22 CAR comprises any heavy chain variable region listed in Table 9A or 9B. In embodiments, the CD22 CAR comprises any light chain variable region listed in Table 10A or 10B and any heavy chain variable region listed Table 9A or 9B.

[0246] In embodiments, the B-cell inhibitor comprises a CAR which comprises an antibody or antibody fragment which includes an antigen binding domain, a transmembrane domain, and an intracellular signaling domain comprising a stimulatory domain, and wherein said antigen binding domain comprises one or more of (e.g., all of) light chain complementarity determining region 1 (LC CDR1), light chain complementarity determining region 2 (LC CDR2), and light chain complementarity determining region 3 (LC CDR3), and one or more of (e.g., all of) heavy chain complementarity determining region 1 (HC CDR1), heavy chain complementarity determining region 2 (HC CDR2), and heavy chain complementarity determining region 3 (HC CDR3).

[0247] In embodiments, the B-cell inhibitor comprises a CAR which comprises a scFv. In embodiments, the B-cell inhibitor comprises a CAR which comprises a transmembrane domain that comprises a transmembrane domain of a protein selected from the group consisting of the alpha, beta or zeta chain of the T-cell receptor, CD28, CD3 epsilon, CD45, CD4, CD5, CD8, CD9, CD16, CD22, CD33, CD37, CD64, CD80, CD86, CD134, CD137 and CD154. In embodiments, the antigen binding domain is connected to the transmembrane domain by a hinge region. In embodiments, the hinge region comprises SEQ ID NO:14, or a sequence with 95-99% identity thereof. In embodiments, the costimulatory domain is a functional signaling domain obtained from a protein selected from the group consisting of OX40, CD2, CD27, CD28, ICAM-1, LFA-1 (CD11a/CD18), ICOS (CD278), and 4-1BB (CD137). In embodiments, the costimulatory domain is a functional signaling domain obtained from a protein selected from the group consisting of MHC class I molecule, TNF receptor proteins, Immunoglobulin-like proteins, cytokine receptors, integrins, signaling lymphocytic activation molecules (SLAM proteins), activating NK cell receptors, BTLA, a Toll ligand receptor, OX40, CD2, CD7, CD27, CD28, CD30, CD40, ICAM-1, LFA-1 (CD11a/CD18), 4-1BB (CD137), B7-H3, ICAM-1, ICOS (CD278), GITR, BAFFR, LIGHT, HVEM (LIGHTR), KIRDS2, SLAMF7, NKp80 (KLRF1), NKp44, NKp30, NKp46, CD19, CD4, CD8alpha, CD8beta, IL2R beta, IL2R gamma, IL7R alpha, ITGA4, VLA1, CD49a, ITGA4, IA4, CD49D, ITGA6, VLA-6, CD49f, ITGAD, CD11d, ITGAE, CD103, ITGAL, CD11a, LFA-1, ITGAM, CD11b, ITGAX, CD11c, ITGB1, CD29, ITGB2, CD18, LFA-1, ITGB7, NKG2D, NKG2C, TNFR2, TRANCE/RANKL, DNAM1 (CD226), SLAMF4 (CD244, 2B4), CD84, CD96 (Tactile), CEACAM1, CRTAM, Ly9 (CD229), CD160 (BY55), PSGL1, CD100 (SEMA4D), CD69, SLAMF6 (NTB-A, Ly108), SLAM (SLAMF1, CD150, IPO-3), BLAME (SLAMF8), SELPLG (CD162), LTBR, LAT, GADS, SLP-76, PAG/Cbp, CD19a, and a ligand that specifically binds with CD83. In embodiments, the costimulatory domain comprises a sequence of SEQ ID NO:16 or SEQ ID NO:51. In embodiments, the intracellular signaling domain comprises a functional signaling domain of 4-1BB and/or a functional signaling domain of CD3 zeta.

[0248] In embodiments, the intracellular signaling domain comprises the sequence of SEQ ID NO: 16 and/or the sequence of SEQ ID NO:17 or SEQ ID NO:43. In embodiments, the CAR further comprises a leader sequence. In embodiments, the leader sequence comprises SEQ ID NO: 13.

[0249] In embodiments, the cells that express the CAR molecule comprise T cells or NK cells.

[0250] In embodiments, the disease associated with CD19 expression is selected from a proliferative disease such as a cancer or malignancy or a precancerous condition such as a myelodysplasia, a myelodysplastic syndrome or a preleukemia, or is a non-cancer related indication associated with expression of CD19. In embodiments, the disease is one or more of a hematologic cancer, acute leukemia, B-cell acute lymphoid leukemia (BALL), T-cell acute lymphoid leukemia (TALL), small lymphocytic leukemia (SLL), acute lymphoid leukemia (ALL); chronic leukemia, chronic myelogenous leukemia (CIVIL), or chronic lymphocytic leukemia (CLL).

[0251] In embodiments, the method further comprises administering an agent that increases the efficacy of a cell expressing a CAR molecule. In embodiments, the method further comprises administering an agent that ameliorates one or more side effects associated with administration of a cell expressing a CAR molecule. In embodiments, the cells expressing a CAR molecule are administered in combination with an agent that treats the disease associated with CD19.

[0252] In embodiments, in accordance with a method described herein, e.g., a method of providing anti-tumor immunity to a mammal, or method of treating a mammal, a mammal is a non-responder, partial responder, or complete responder to a previously administered cancer therapy, e.g., a CD19 CAR therapy or a cancer therapy other than a CD19 CAR-expressing cell. In embodiments, the mammal is a non-relapser, partial relapse, or complete relapse to a previously administered cancer therapy, e.g., a CD19 CAR therapy or a cancer therapy other than a CD19 CAR-expressing cell. In embodiments, the mammal comprises a CD19-negative cancer cell or a CD19-positive cancer cell, optionally wherein the mammal further comprises a CD22-positive, CD123-positive, FLT-3-positive, ROR-1-positive, CD79b-positive, CD179b-positive, CD79a-positive, CD10-positive, CD34-positive, and/or CD20-positive cancer cell. In embodiments, the mammal has a relapsed ALL cancer. In embodiments, the mammal was previously administered a CD19 CAR-expressing cell and is refractory to CD19 CAR treatment.

[0253] In embodiments, the agent is an mTOR inhibitor and the subject is administered a low, immune enhancing, dose of an mTOR inhibitor, e.g., RAD001 or rapamycin. In embodiments, the mTOR inhibitor is a RAD001. In embodiments, the dose comprises an allosteric and a catalytic mTOR inhibitor. In embodiments, the mTOR inhibitor is administered for an amount of time sufficient to decrease the proportion of PD-1 positive T cells, increase the proportion of PD-1 negative T cells, or increase the ratio of PD-1 negative T cells/PD-1 positive T cells, in the peripheral blood of the subject, or in a preparation of T cells isolated from the subject.

[0254] In embodiments, the immune effector cell, e.g., T cell, to be engineered to express a CAR, is harvested after a sufficient time, or after sufficient dosing of the low, immune enhancing, dose of an mTOR inhibitor, such that the level of PD1 negative immune effector cells, e.g., T cells, or the ratio of PD1 negative immune effector cells, e.g., T cells/PD1 positive immune effector cells, e.g., T cells, in the subject or harvested from the subject has been, at least transiently, increased. In embodiments, the dose of an mTOR inhibitor is associated with mTOR inhibition of at least 5 but no more than 90%, e.g., as measured by p70 S6 K inhibition. In embodiments, the dose of an mTOR inhibitor is associated with mTOR inhibition of at least 10% but no more than 40%, e.g., as measured by p70 S6 K inhibition.

[0255] In an embodiment, the method further comprises administering a checkpoint inhibitor. In embodiments, the subject receives a pre-treatment of with an agent, e.g., an mTOR inhibitor, and/or a checkpoint inhibitor, prior to the initiation of a CART therapy. In embodiments, the subject receives concurrent treatment with an agent, e.g., an mTOR inhibitor, and/or a checkpoint inhibitor. In embodiments, the subject receives treatment with an agent, e.g., an mTOR inhibitor, and/or a checkpoint inhibitor, post-CART therapy.

[0256] In embodiments, the determined level or determined characteristic is acquired before, at the same time, or during a course of CART therapy.

[0257] In embodiments, the method comprises assaying a gene signature that indicates whether the subject is likely to relapse, or has relapsed. In embodiments, the method comprises assaying a gene signature in a subject prior to treatment with a CAR-expressing cell, e.g., CART treatment (e.g., a CART19 treatment, e.g., CTL019 therapy) that predicts relapse to CAR treatment. In embodiments, the level of one or more markers is the level of at least 2, 3, 4, 5, 6, 7, 8, 9, or 10 markers listed in Table 29. In embodiments, the level of the marker comprises an mRNA level or a level of a soluble protein.

[0258] In embodiments, the characteristic of CD19 is a mutation in exon 2, e.g., a mutation causing a frameshift or a premature stop codon or both. In embodiments, the level of T_{REG} cells is determined by staining a sample for a marker expressed by T_{REG} cells. In embodiments, the level of T_{REG} cells is the level of Treg cells in a relevant location in the subject's body, e.g., in a cancer microenvironment.

[0259] In embodiments, the method further comprises decreasing the T_{REG} signature in the subject prior to apheresis. In embodiments, the method further comprises decreasing the T_{REG} signature in the subject, e.g., by administering cyclophosphamide, an anti-GITR antibody, or both to the subject. In embodiments, the method comprises pre-treating a subject with cyclophosphamide, an anti-GITR antibody, or both, prior to collection of cells for CAR-expressing cell product manufacturing. In embodiments, the method further comprises obtaining a sample from the subject, wherein the sample comprises a cellular fraction (e.g., which comprises blood), a tissue fraction, an apheresis sample, or a bone marrow sample.

[0260] In embodiments, the cell expresses an inhibitory molecule that comprises a first polypeptide that comprises at least a portion of an inhibitory molecule, associated with a second polypeptide that comprises a positive signal from an intracellular signaling domain. In embodiments, the inhibitory molecule comprise first polypeptide that comprises at least a portion of PD1 and a second polypeptide comprising a costimulatory domain and primary signaling domain.

[0261] In embodiments, the method comprises assaying a gene signature that indicates whether a subject treated with the cell is likely to relapse, or has relapsed. In embodiments, the method comprises assaying the gene signature in the cell prior to infusion into the subject. In embodiments, the method further comprises decreasing the T_{REG} signature of a population of cells comprising the transduced cell. In embodiments, decreasing the T_{REG} signature comprises performing CD25-depletion on the population of cells.

[0262] In embodiments, the subject is a mammal, e.g., a human.

[0263] Unless otherwise defined, all technical and scientific terms used herein have the same meaning as commonly understood by one of ordinary skill in the art to which this invention belongs. Although methods and materials similar or equivalent to those described herein can be used in the practice or testing of the present invention, suitable methods and materials are described below. All publications, patent applications, patents, and other references mentioned herein (e.g., sequence database reference numbers) are incorporated by reference in their entirety. For example, all GenBank, Unigene, and Entrez sequences referred to herein, e.g., in any Table herein, are incorporated by reference. Unless otherwise specified, the sequence accession numbers specified herein, including in any Table herein, refer to the database entries current as of Apr. 8, 2015. When one gene or protein references a plurality of sequence accession numbers, all of the sequence variants are encompassed.

[0264] In addition, the materials, methods, and examples are illustrative only and not intended to be limiting.

[0265] Headings, sub-headings or numbered or lettered elements, e.g., (a), (b), (i) etc, are presented merely for ease of reading. The use of headings or numbered or lettered elements in this document does not require the steps or elements be performed in alphabetical order or that the steps or elements are necessarily discrete from one another.

[0266] Other features, objects, and advantages of the invention will be apparent from the description and drawings, and from the claims.

### BRIEF DESCRIPTION OF THE DRAWINGS

[0267] FIGS. 1A and 1B are schematics of representative CARs.

[0268] FIG. 2 contains images of immunohistochemical analysis of a Hodgkin lymphoma showing CD19 expressing cells present in the tumor. The left panel is at 1× magnification and the right panel is at 20× magnification.

[0269] FIG. 3 is a schematic diagram of the experimental set-up for a study to assess the therapeutic efficacy of CART19 treatment in patients with Hodgkin lymphoma.

[0270] FIGS. 4A, 4B, 4C, and 4D show flow cytometry analysis of PD1 and CAR19 expression on T cells. FIGS. 4A and 4B are representative flow cytometry profiles demonstrating the distribution of PD-1 and CAR19 expression on CD4+ T cells from subjects that are complete responders (CR) or non-responders (NR) to CART therapy. FIG. 4C is a graph showing the percent of PD1 cells in the CD4+ T cell population from groups of subjects with different responses to CART therapy. FIG. 4D is a graph showing the percent of PD1 cells in the CD8+ T cell population from groups of subjects with different responses to CART therapy.

[0271] FIGS. 5A and 5B show the distribution of PD1 expression in CD4 and CAR19-expressing cells (FIG. 5A) or CD8 and CAR19-expressing cells (FIG. 5B) from groups of subjects with different responses to CART therapy.

[0272] FIG. 6 shows flow cytometry analysis of PD1, CAR 19, LAG3, and TIM3 expression on T cells from subjects that are complete responders (CR) or non-responders (NR) to CART therapy.

[0273] FIGS. 7A and 7B show the distribution of PD1 and LAG3 expression (FIG. 7A) or PD1 and TIM3 expression (FIG. 7B) from groups of subjects with different responses to CART therapy.

[0274] FIG. 8 shows the plasma cell IgA immunophenotyping from a myeloma patient who received CART19, demonstrating the response to CART19 therapy.

[0275] FIGS. 9A and 9B show IL-7 receptor (CD127) expression on cancer cell lines and CART cells. Expression of CD127 was measured by flow cytometry analysis in three cancer cell lines: RL (mantle cell lymphoma), JEKO (also known as Jeko-1, mantle cell lymphoma), and Nalm-6 (B-ALL) (FIG. 9A). CD127 expression was measured by flow cytometry analysis on CD3 positive (CART) cells that had been infused and circulating in NSG mice (FIG. 9B).

[0276] FIGS. 10A, 10B, and 10C show the anti-tumor response after CART19 treatment and subsequent IL-7 treatment. NSG mice engrafted with a luciferase-expressing mantle lymphoma cell line (RL-luc) at Day 0 were treated with varying dosages of CART19 cells at Day 6, and tumor burden was monitored. Mice were divided into 4 groups and received no CART19 cells, 0.5×10⁶ CART19 cells (CART19 0.5E6), 1×10⁶ CART19 cells (CART19 1E6), or 2×10⁶ CART19 cells (CART19 2E6). Tumor burden after CART treatment was measured by detection of bioluminescence (mean BLI) (FIG. 10A). Mice receiving 0.5×10⁶ CART19 cells (CART19 0.5E6) or 1×10⁶ CART19 cells (CART19 1E6) were randomized to receive recombinant human IL-7 (rhIL-7) or not. Tumor burden, represented here by mean bioluminescence (BLI), was monitored for the three mice (#3827, #3829, and #3815, receiving the indicated initial CART19 dose) from FIG. 10A that were treated with IL-7 starting at Day 85 (FIG. 10B). IL-7 was administered through IP injection 3 times weekly. Tumor burden, represented here by mean bioluminescence (BLI) before Day 85 (PRE) and after Day 115 (POST) was compared between mice that did not receive IL-7 (CTRL) and mice that received IL-7 treatment (IL-7) (FIG. 10C).

[0277] FIGS. 11A and 11B show the T cell dynamics after IL-7 treatment. The level of human T cells detected in the blood was monitored for each of the mice receiving IL-7 or control mice (FIG. 11A). The level of CART19 cells (CD3+ cells) detected in the blood was measured before (PRE) and 14 days after (Day 14) initiation of IL-7 treatment (FIG. 11B).

[0278] FIG. 12 depicts the structures of two exemplary RCAR configurations. The antigen binding members comprise an antigen binding domain, a transmembrane domain, and a switch domain. The intracellular binding members comprise a switch domain, a co-stimulatory signaling domain and a primary signaling domain. The two configurations demonstrate that the first and second switch domains described herein can be in different orientations with respect to the antigen binding member and the intracellular binding member. Other RCAR configurations are further described herein.

[0279] FIG. 13 depicts two constructs for bispecific CARs with anti-C22 and anti-CD19 binding domains. “4G4S” represents the linker sequence GGGGSGGGGSGGGGSGGGGS (SEQ ID NO: 1311).

[0280] FIG. 14 is a graph depicting the activity of bispecific CD19/CD22 CAR constructs in an NFAT assay.

[0281] FIGS. 15A, 15B, and 15C are graphs showing the extent of CAR T-cell activation (measured by relative luminescence) in the presence of various tumor target cell lines. FIG. 15A shows CAR T-cell activation in the presence of CD20 expressing target cell line, Daudi. FIG. 15B shows CAR T-cell activation in the presence of CD20 expressing target cell line, Raji. FIG. 15C shows CAR T-cell activation in the presence of a non CD20 expressing negative control, K562.

[0282] FIG. 16 is an exemplary schematic illustrating an overview of the gene signature analysis. Briefly, for each gene set, a 2-group statistical model was applied to determine whether the meta-gene was statistically different between the CRs, PRs, and NRs. CRs are more like resting T_{EFF} cells, whereas NR are more like activated T_{EFF} cells. Genes upregulated in activated versus resting T_{EFF} cells are also upregulated in NRs.

[0283] FIG. 17 depicts exemplary results (p=0.000215) illustrating that T_{REG} genes have high expression levels in samples from pediatric patients who were complete responders who became relapsers (R) compared to complete responders (CR) who did not relapse. The x-axis is samples by response group where CR=complete responder without relapse and R=relapser. The y-axis is normalized meta-gene expression scores.

[0284] FIGS. 18A, 18B, and 18C are graphs showing CAR T-cell activation in the presence of tumor target cell lines. In FIG. 18A, CAR-expressing JNL cells were mixed with the Daudi CD22 expressing target cell line at the indicated E:T ratios. In FIG. 18B, CAR-expressing JNL cells were mixed with the Raji CD22 expressing target cell line at the indicated E:T ratios. In FIG. 18C, CAR-expressing JNL cells were mixed with the negative control K562 cell line at the indicated E:T ratios.

[0285] FIGS. 19A, 19B, 19C, and 19D are a graph showing primary T-cells expression of chimeric antigen receptor on the cell surface. Protein-L-biotin/SA-PE (FIG. 19A and FIG. 19B) and rhCD22-Fc/anti-Fc488 (FIGS. 19C and 19D) were used to determine CAR surface expression levels. Cells with no CAR were used as a negative control.

[0286] FIGS. 20A, 20B, 20C, 20D, 20E, and 20F are graphs showing a primary T-cell tumor target killing assay. Primary T-cells activated and transduced with CD22 CAR were mixed with target cell lines stably expressing luciferase at the ratios indicated and target cell killing was measured. The percent killing was normalized to hCD22-8 (28.8% transduction). CD22-expressing cell lines Raji (FIG. 20A), SEM (FIG. 20B), K562-hCD22 (FIG. 20C), Daudi (FIG. 20D), and Nalm6 (FIG. 20E) were used to test the function CD22 CAR clones in comparison with positive control CD22 CAR m971 (m971-HL), negative control CAR m971-LH, and untransduced T-cells as a negative control. K562 cell line does not express CD22 and was used as a negative control (FIG. 20F).

[0287] FIGS. 21A, 21B, 21C, 21D, 21E, and 21F are graphs showing induction of a significant proinflammatory cytokine response by CD22 CAR clones. Primary T-cell killing assays were used to determine the ability of CD22 CAR clone to produce the proinflammatory cytokines IFN-g, IL-2 and TNFa. Effector cells were co-cultured for 20 hours with each of the different target cell lines, normalized to 28.8% transduction. Supernatants were taken from different cultures with varying E:T ratios of 2.5:1 and 10:1 from Raji CD22 expressing target cells (FIG. 21A), Nalm6 CD22 expressing target cells (FIG. 21B), Daudi CD22 expressing target cells (FIG. 21C), SEM CD22 expressing target cells (FIG. 21D), K562-hCD22 CD22 expressing target cells (FIG. 21E), and K562 non-CD22 expressing cells (negative control) (FIG. 21F).

[0288] FIG. 22 is a graph depicting the expression of various B-cell antigens in relapsed ALL is a graph depicting the expression of various B-cell antigens in relapsed ALL as detected by flow cytometry. Samples from 16 r/r patients were screened by multiparametric flow cytometry for the following markers: CD19 (16 pts), CD22 (16 pts), CD123 (16 pts), FLT-3 (9 pts), ROR-1 (3 pts), CD79b (15 pts), CD179b (8 pts), CD79a (16 pts), CD10 (16 pts), CD34 (16 pts), and CD20 (16 pts). CD22 and CD123 were highly (>60%) and homogeneously expressed in the blasts of r/r ALL patients (bar indicates median % expression, respectively 99.50%, 98.80%, 95.70%, 72.00%, 47.00%, 15.00%, 13.45%, 4.200%, 98.00%, 87.65%, and 7.00%). For each patient, the percentage of cells expressing the marker indicated is shown as a single data point.

[0289] FIG. 23 is a set of graphs showing is a set of graphs showing expression of CD22 and CD123 in 6 patients relapsing with CD19-negative leukemia, both before CART19 treatment (baseline) and after (CD19-neg relapse). In all analyses, the population of interest was gated based on forward vs. side scatter characteristics followed by singlet gating, and live cells were gated using Live Dead Aqua (Invitrogen). Time gating was included for quality control. The gating strategy included: time gating→SSC low→singlets→live→CD45dim CD10+.

[0290] FIG. 24 is a set of graphs showing the expression of CD22 in in blasts from patient relapsing with CD19-neg disease after CART19 treatment (clinical trials UPCC04409/CHP959, patient UPN indicated in the squared box). The top row shows the CD19 and CD22 expression in blasts before CART19 treatment while the bottom row shows the disease phenotype at relapse. CD22 expression was maintained also at relapse when CD19 expression was lost.

[0291] FIG. 25 is a set of graphs showing the expression of CD123 in is a set of graphs showing expression of CD123 in blasts from patient relapsing with CD19-neg disease after CART19 treatment (clinical trials UPCC04409/CHP959, patient UPN indicated in the squared box). The top row shows the CD19 and CD123 expression in blasts before CART19 treatment while the bottom row shows the disease phenotype at relapse. CD123 expression was maintained at relapse in most of the patients while CD19 expression was lost.

[0292] FIG. 26 is a graph showing the median expression of CD19, CD22 and CD123 before and after CART19 treatment in patients relapsing with a CD19-negative disease. CD19 expression was lost at relapse (94.25% vs. 0%, p=0.0009), while CD22 (99.20% vs. 97.30%, p=ns) and CD123 (63.00% vs. 48.75%, p=ns) were still expressed. For each patient, the percentage of cells expressing the marker indicated is shown as a single data point.

[0293] FIGS. 27A and 27B are a series of graphs showing CD22 expression in samples from 16 r/r patients and 4 patients relapsing with CD19-negative disease after treatment with CART19 therapy. Samples were screened by multiparametric flow cytometry for the B cell marker, CD22. CD22 was highly (>60%) and homogeneously expressed in the blasts of 11/15 r/r ALL patients (FIG. 27A). CD22 was positive in 4/4 patients relapsing with CD19-negative leukemia, both before CART19 treatment (baseline) and after (CD19-neg relapse) (2 pts shown) (FIG. 27B). Gating strategy: SSC low→singlets→live→CD45dim

[0294] FIGS. 28A, 28B, and 28C are a series of graphs showing the effect of CD22 CART on CD19 and CD22 expression. Schema of the two CAR22 constructs that were generated using different chain orientations (H to L and L to H) is shown (FIG. 28A). The anti-CD22 scFv (m971) was codon optimized and cloned in the murine CAR19 vector containing CD8 hinge, 41-BB costimulatory and CD3 zeta signaling domains (FIG. 28A). The expression of CD19, CD22 and isotype control on NALM6 ALL cell line is shown as mean fluorescence intensity (MFI) (FIG. 28B) and antibody-binding capacity (ABC) (FIG. 28C). In NALM-6 the expression of CD19 was higher than CD22. However, in most primary ALL samples the CD19 and CD22 expressions were similar (see FIG. 27A).

[0295] FIGS. 29A, 29B, and 29C are a series of graphs showing normal donor T cell expansions for generating CART22 and CART19 (together with UTD cells). Population doublings (PD) versus days in culture: at the end of the expansion (day 11) CART22 and control T cells reached around 4.5 PD, with no significant difference in comparison to CART19 or UTD cells (FIG. 29A). T cell volume (fl) versus days in culture: at day 6 there was peak volume (around 450 fl) while in the following days the volume decreased down to 300 fl when the cells are harvested and frozen. No significant different was observed versus CART19 or UTD cells (FIG. 29B). CAR expression on CD4-positive and CD8-positive T-cells at day 11 of expansion is shown in FIG. 29C. Gating for CAR expression is based on UTD. Gating strategy: FSS vs SSC lymphocytes→singlets→live→CD3+.

[0296] FIG. 30 is a series of graphs showing a CD107a degranulation assay with intra-cytoplasmic cytokine production. CART19, CART22 HtoL and LtoH were co-cultured with different targets (alone, PMA/IONOMYCIN, MOLM-14 and NALM-6). CART19 and CART22 HtoL show high levels of CD107a degranulation, IL-2, IFNg and TNFa production when co-cultured with the ALL cell line (NALM-6) but not when co-cultured with negative controls. UTD and CART22 LtoH did not show degranulation nor cytokine productions. Gating strategy: FSS vs SSC lymphocytes→singlets→live→CD3+.

[0297] FIG. 31 is a graph showing a luciferase-based killing assay. CART22 and CART19 HtoL but not UTD cells were able to lyse NALM-6 cells when co-cultured os for 24 hours. A direct correlation between cytotoxic activity and E:T ratios was observed, with better anti-leukemia effect at 2:1 E:T ratio (78% and 75% killing for CART19 and CART22).

[0298] FIGS. 32A and 32B are a series of graphs showing a CFSE-based proliferation assay. Co-culture for 5 days of CART22 and CART19 with the ALL cell line NALM-6 led to significant T cell proliferation (94% and 92.9% respectively). Controls are also shown (TCM=media alone, P-I=PMA/Ionomycin, MOLM-14) (FIG. 32A). In histograms showing the dynamics of CFSE dilution in CART19 and CART22, most of T cells underwent multiple proliferative cycles (FIG. 32B). Gating strategy: FSS vs SSC lymphocytes→singlets→live→CD3+.

[0299] FIG. 33 is a series of graphs showing cytokine production. CART22, CART19 and UTD were incubated for 24 hours with different irradiated targets (alone, PMA/Ionomycin, MOLM-14 and NALM-6). When co-cultured with the ALL cell line NALM-6 only CART22 and CART19 HtoL were able to release multiple cytokines (here shown IFNg, IL-2, GM-CSF, TNFa and MIP1b). Results are shown as mean intensity fluorescence (MFI).

[0300] FIGS. 34A and 34B are a series of graphs showing T-cell degranulation with primary ALL blasts. CART22, CART19 and UTD cells were co-incubated for 4 hours with blasts derived from an ALL patient (CHP-959-101) at baseline and after CART19 treatment when the patient relapsed with a CD19-neg disease. Both CART19 and CART22 were able to degranulate at baseline (when blasts are CD19+ and CD22+) but at relapse only CART22 was degranulating (when the disease is CD19-neg) (FIG. 34A). Dot-plots showing CD107a degranulation in CD8-pos and CD8-neg CART19 and CART22 effector after incubation with CHP101 sample at relapse demonstrate only CART22 showed degranulation in both CD8 and CD4 T cells (FIG. 34B). Gating strategy: FSS vs SSC lymphocytes→singlets→live→CD3+.

[0301] FIGS. 35A, 35B, 35C, and 35D are a series of graphs showing in vivo CART22 efficacy against NALM-6. A. Schema of the experiment: 1 million NALM-6 luciferase+ cells/mouse were injected i.v. in NSG mice. After 6 days tumor engraftment was assessed by bioluminescence. Mice were then randomized to receive untransduced T cells or different doses of CART22 (from 1.25 to 5 million total cells/mouse, with 75% CAR expression). Mice were then monitored for tumor burden, PB T cell expansion, and survival (FIG. 35A). Tumor burden by bioluminescence (BLI) detected a dose-related anti leukemia response. Mice receiving 5e⁶ CART22 cells showed better tumor control (FIG. 35B). CART22 treated mice showed a statistically significant better overall survival (OS) in comparison to mice treated with UTD cells. For OS there was a significant correlation between higher dose of CART22 and better OS (FIG. 35C). T-cell in vivo expansion was monitored weekly by retro-orbital bleedings. One week after T cell infusion mice receiving the higher dose of CART22 showed better CART expansion (median of 12 T cells/μl) (FIG. 35D).

[0302] FIGS. 36A and 36B are a series of graphs showing an in vivo comparison between CART22 and CART19 against NALM-6. Schema of the experiment: 1 million NALM-6 luciferase+ cells/mouse were injected i.v. in NSG mice. After 6 days tumor engraftment was assessed by bioluminescence. Mice were then randomized to receive untransduced T cells, CART19 or CART22 (5 million total cells, with 75% CAR expression). Mice were then monitored for tumor burden, PB T cell expansion, and survival (FIG. 36A). Tumor burden by bioluminescence (BLI) demonstrated anti leukemia response in both CART22 and CART19 treated mice, while UTD mice rapidly progressed (FIG. 36B). CART19 treated mice showed better overall survival (OS) in comparison to CART22, possibly due to the different target expression in NALM-6 (CD19>>CD22) (FIG. 36C).

[0303] FIGS. 37A and 37B are a series of graphs showing an in vivo comparison between CART22 and CART19 in a model of primary ALL. The blasts of a primary ALL patient (JH331) were passaged in vivo and transduced with luciferase to follow tumor burden. Schema of the experiment: 1 million JH331 luciferase+ cells/mouse were injected i.v. in NSG mice. After 14 days tumor engraftment was assessed by bioluminescence. Mice were then randomized to receive untransduced T cells, CART19 or CART22 (5 million total cells, with 75% CAR expression). Mice were then monitored for tumor burden, PB T cell expansion, and survival (FIG. 37A). Tumor burden by bioluminescence (BLI) detected anti leukemia response in both CART22 and CART19 treated mice, while UTD mice rapidly progressed (FIG. 37B).

[0304] FIGS. 38A, 38B, and 38C are a series of images showing tissue microarrays for CD22 expression on 28 human normal tissues by immunohistochemistry staining. Lymphoid organs resulted positive for CD22 expression (tonsil, lymph node, spleen and thymus) (FIG. 38A). Non-lymphoid organs showed no expression of CD22 (FIG. 38B). CD22-positive resident B-cells were observed in multiple tissues (FIG. 38C). *=non-specific staining.

[0305] FIGS. 39A, 39B, 39C and 39D are a graph showing CD22 RNA-expression data from GeneAtlas U133A. CD22 expression was observed at high level in B-cells, tonsil and lymph node. B-lymphoblast and leukemia/lymphoma cell lines were also highly positive.

[0306] FIG. 40 is a series of graphs showing a 51-Chromium-release assay for CART22 toxicity. Both CART22 and CART19 but not UTD cells triggered the lysis of the ALL cell line NALM-6. No cytotoxic effect of CART22 was observed in any normal tissue (CD34+, human neuronal progenitors or neurons and keratinocytes) or control (K562 cell line).

[0307] FIG. 41 shows a graphical representation of CAR expression in JNL cells transduced with anti-CD123 CAR constructs as evaluated by FACS and reported as the percent of cells showing signal above the level of signal in untransduced (CAR negative) cells using Protein L as a detection reagent.

[0308] FIGS. 42A, 42B, and 42C show graphical representations of CD123 CAR activity in JNL cells. Anti-CD123 CAR constructs were evaluated for activity using a Jurkat cell line containing the luciferase reporter driven by the NFAT promoter (termed JNL cells). CAR activity is measured as activation of this NFAT-driven reporter.

[0309] FIGS. 43A and 43B show CD123 expressing and activity. FIG. 43A shows a graphical representation of CD123 CAR expression in primary T-cells. Percentage of cells transduced (expressing the anti-CD123 CAR on the cell surface) and their relative fluorescence intensity of expression were determined by flow cytometric analysis on a BD LSRFortessa or BD-FACSCanto using Protein L as a detection reagent. Gating histogram plots of relative fluorescent intensity from that FACS for signal above unstained cells shows the percentage of transduced T cells. Transduction resulted in a range of CAR positive cells from 12-42%. FIG. 43B shows a graphical representation of CD123-CART-mediated cell killing. T cell killing was directed towards CD123-expressing MOLM13 acute myelogenous leukemia cells stably expressing luciferase. Untransduced T cells were used to determine non-specific background killing levels. The cytolytic activities of CART-CD123 were measured over a range of effector:target cell ratios of 4:1 and 2-fold downward dilutions of T cells where effectors were defined as T cells expressing the anti-CD123 chimeric receptor. Assays were initiated by mixing an appropriate number of T cells with a constant number of targets cells. After 20 hours luciferase signal was measured using the Bright-Glo™ Luciferase Assay on the EnVision instrument.

[0310] FIGS. 44A and 44B show transduction efficiency of T cells with CD123-CARs. FIG. 44A shows transduction efficiency of T cells with 1172 and 1176. FIG. 44B shows transduction efficiency of T cells with CD123 CARs 2-4.

[0311] FIG. 45 shows flow cytometry of CD123 CARs 2-4 and 1172 and 1176 to determine the CD4:CD8 ratio.

[0312] FIGS. 46A, 46B and 46C show degranulation of CD123 CARs 2-4 and 1172 and 1176 upon exposure to CD123+ tumor cells.

[0313] FIG. 47 shows a graphical representation of a luciferase assay to assess cytotoxicity of CART cells (NVS 2-4, 1172 and 1176 clones) towards tumor target cells (MOLM14).

[0314] FIG. 48 shows a comparison of tumor burden in NSG mice injected with luciferase expressing MOLM14 cells at D6 (before CART injection) and at day 13 (6 days post injection with NVS 2-4, 1172 or 1176 clones) or at day 20.

[0315] FIGS. 49A, 49B, 49C, 49D, 49E, and 49F show CD123 is highly expressed in CD19-neg B-cell acute lymphoblastic leukemia relapses occurring after CART19 treatment. FIG. 49A shows expression of CD123 compared to CD19 in 42 relapsing/refractory ALL samples. FIG. 49B shows CD123 and CD19 co-expression in B-ALL blasts. Gated on blasts (SSC low, singlet, live, CD45dim). FIG. 49C shows the gating strategy for the leukemia stem cell (LSC). CD123 is highly expressed in this subset. FIG. 49D shows CD123 and CD19 co-expression and results from FISH analysis. FIGS. 49E and 49F show the comparison of CD19 and CD123 expression at baseline or after relapse.

[0316] FIGS. 50A, 50B, 50C, 50D, 50E, and 50F shows results from various in vitro assays using T cells expressing a CD19 CAR (CAR19) or a CD123 CAR (CAR123). FIG. 50A shows CD19 and CD123 expression; FIG. 50B shows a CD107a degranulation assay; FIG. 50C shows the capability for targeted cell killing; FIGS. 50D and 50E shows proliferation capacity; FIG. 50F shows cytokine production for the indicated cytokines.

[0317] FIGS. 51A, 51B, and 51C show that CART cells expressing CD19 CAR (CAR19) or CD123 CAR (CAR123) had an anti-tumor effect in an in vivo mouse model. FIG. 51A shows the tumor burden represented by bioluminescent imaging; FIG. 51B shows the overall survival curve of mice receiving CART therapy; and FIG. 51C shows the expansion of CART123 cells in the peripheral blood.

[0318] FIGS. 52A, 52B, 52C, 52D, 52E, and 52F show that CART123 is active in an in vivo mouse model of antigen-loss relapse. FIG. 52A shows the experimental schema; FIG. 52B shows disease progression as represented by bioluminescent imaging in baseline and relapse disease with respect to CD19 expression (top graph) and in response to treatment with CART19 therapy (bottom graph); FIG. 52C shows bioluminescent images of mice administered untransduced T cells or CART19 cells; FIG. 52D shows the experimental schema for treating with CART19 or CART123; FIG. 52E shows the disease progression; and FIG. 52F shows the overall survival of the treated mice.

[0319] FIGS. 53A, 53B, and 53C show ALL-CART interactions in skull bone marrow of xenograft mice. FIG. 53A shows the experimental schema; FIG. 53B shows representative multiphoton XY plane images of CART19 cells and CART123 cells interacting with ALL tumor engineered to express either CD19 and CD123 or CD123 alone (motile cells are indicated in dashed circles, non-motile cells are indicated with the arrows); and FIG. 53C is a graphic representation of the microscopy images.

[0320] FIGS. 54A, 54B, and 54C show the prevention of CD19-neg relapses using CART19 and CART123. FIG. 54A shows the experimental schema; FIG. 54B shows the disease progression (tumor burden as represented by BLI) of mice treated with untransduced T cells (top graph), CART19 (middle graph), or the combination of CART19 and CART123 (bottom graph); and FIG. 54C shows the overall survival from this experiment.

[0321] FIGS. 55A and 55B, show T cells expressing both CAR19 and CAR123 (FIG. 55A) and the results from a degranulation assay (FIG. 55B).

[0322] FIGS. 56A and 56B show characterization of ALL blasts. FIG. 56A shows expression of various markers CD19, CD123, CD10, CD34, and CD20; and FIG. 56B shows the gating strategy for sorting CD19−CD123+ cells.

[0323] FIGS. 57A, 57B, 57C, and 57D show anti-leukemia activity of CART123. FIG. 57A shows the expression of CD19 and CD123 on the NALM6 cells; FIG. 57B shows the tumor burden (as represented by BLI) in response to CART19 or CART123 therapy; FIG. 57C shows the overall survival of mice administered CART19 or CART123; and FIG. 57D shows the overall survival of mice administered varying doses of CART123.

[0324] FIGS. 58A and 58B show the characterization of the in vivo model of antigen-loss relapse. FIG. 58A shows the expression of CD123 in CD19 negative relapse disease; and FIG. 58B shows the degranulation assay of CART19 or CART123 cells when cultured with baseline or relapse cells in vitro.

[0325] FIG. 59 shows that the proliferation of CAR-expressing, transduced T cells is enhanced by low doses of RAD001 in a cell culture system. CARTs were co-cultured with NALM6 (Nalm-6) cells in the presence of different concentrations of RAD001 (nM). The number of CAR-positive CD3-positive T cells (black) and total T cells (white) was assessed after 4 days of co-culture.

[0326] FIG. 60 depicts tumor growth measurements of NALM6-luc cells with daily RAD001 dosing at 0.3, 1, 3, and 10 mg/kg (mpk) or vehicle dosing. Circles denote the vehicle; squares denote the 10 mg/kg dose of RAD001; triangles denote the 3 mg/kg dose of RAD001, inverted triangles denote the 1 mg/kg dose of RAD001; and diamonds denote the 0.3 mg/kg dose of RAD001.

[0327] FIGS. 61A and 61B show pharmacokinetic curves showing the amount of RAD001 in the blood of NSG mice with NALM6 tumors. FIG. 61A shows day 0 PK following the first dose of RAD001. FIG. 61B shows Day 14 PK following the final RAD001 dose. Diamonds denote the 10 mg/kg dose of RAD001; squares denote the 1 mg/kg dose of RAD001; triangles denote the 3 mg/kg dose of RAD001; and x's denote the 10 mg/kg dose of RAD001.

[0328] FIGS. 62A and 62B show in vivo proliferation of humanized CD19 CART cells with and without RAD001 dosing. Low doses of RAD001 (0.003 mg/kg) daily lead to an enhancement in CAR T cell proliferation, above the normal level of huCAR19 proliferation. FIG. 62A shows CD4+ CAR T cells; FIG. 62B shows CD8+ CAR T cells. Circles denote PBS; squares denote huCTL019; triangles denote huCTL019 with 3 mg/kg RAD001; inverted triangles denote huCTL019 with 0.3 mg/kg RAD001; diamonds denote huCTL019 with 0.03 mg/kg RAD001; and circles denote huCTL019 with 0.003 mg/kg RAD001.

[0329] FIG. 63 shows multiplex FIHC AQUA analysis showing significant difference between CD3+/PD-1+ cell populations in primary and secondary human DLBCL patient samples.

[0330] FIG. 64 shows AQUA analysis showing various levels of CD19 (lower panel) and PD-L1 (upper panel) in primary and secondary sites of DLBCL samples. A total of 40 human DLBCL patient samples, 25 primary and 15 secondary sites, were subjected to multiplex FIHC and followed by AQUA analysis to identify expression levels of CD19 and PD-L1 proteins.

[0331] FIG. 65 shows a schematic of two populations of CAR-expressing cells. In the population on the left (pooled), each cell expresses one type of CAR. In the population on the right (bicistronic CAR), each cell expresses two types of CAR.

[0332] FIG. 66 shows diagrams of bicistronic CARs. The upper CAR has a CD19 CAR and a CD22 CAR, separated by a P2A protease cleavage site. The lower CAR has a CD19 CAR and a CD123 CAR, separated by a P2A protease cleavage site.

[0333] FIG. 67 shows co-expression of CD19 and CD22 CARs from a bicistronic vector.

[0334] FIG. 68A shows co-expression of CD19 and CD123 CARs from a bicistronic vector.

[0335] FIG. 68B shows the anti-leukemic effect of these cells.

[0336] FIG. 69 shows the tumor burden in mice bearing CD19-negative B-ALL xenografts after treatment with a UTD control, CART19, or CART22.

[0337] FIG. 70 shows the expression of PD-L1, PD1, LAG3, and TIM3 (from left to right in each set of four bars) in lymph node and bone marrow samples from five CR patients, one unclassified patient, and six PD patients.

[0338] FIG. 71 is a graph showing the activation (in RLU) of several CD22 CAR constructs in the presence and absence of a m971 competitor.

[0339] FIG. 72 is a graph showing the activation (in RLU) of additional CD22 CAR constructs.

[0340] FIG. 73 shows three bar graphs indicating CD22 CAR activity in an IFN-gamma assay.

[0341] FIG. 74 shows binding activity of CD22-64 and CD22-65 CARs.

[0342] FIG. 75 is a diagram mapping the epitopes bound by various CD22 scFvs.

### DETAILED DESCRIPTION

### Definitions

[0343] Unless defined otherwise, all technical and scientific terms used herein have the same meaning as commonly understood by one of ordinary skill in the art to which the invention pertains.

[0344] The term “a” and “an” refers to one or to more than one (i.e., to at least one) of the grammatical object of the article. By way of example, “an element” means one element or more than one element.

[0345] The term “about” when referring to a measurable value such as an amount, a temporal duration, and the like, is meant to encompass variations of ±20% or in some instances ±10%, or in some instances ±5%, or in some instances ±1%, or in some instances ±0.1% from the specified value, as such variations are appropriate to perform the disclosed methods.

[0346] The term “apheresis” as used herein refers to the art-recognized extracorporeal process by which the blood of a donor or patient is removed from the donor or patient and passed through an apparatus that separates out selected particular constituent(s) and returns the remainder to the circulation of the donor or patient, e.g., by retransfusion. Thus, “an apheresis sample” refers to a sample obtained using apheresis.

[0347] The term “bioequivalent” refers to an amount of an agent other than the reference compound (e.g., RAD001), required to produce an effect equivalent to the effect produced by the reference dose or reference amount of the reference compound (e.g., RAD001). In an embodiment the effect is the level of mTOR inhibition, e.g., as measured by P70 S6 kinase inhibition, e.g., as evaluated in an in vivo or in vitro assay, e.g., as measured by an assay described herein, e.g., the Boulay assay, or measurement of phosphorylated S6 levels by western blot. In an embodiment, the effect is alteration of the ratio of PD-1 positive/PD-1 negative T cells, as measured by cell sorting. In an embodiment a bioequivalent amount or dose of an mTOR inhibitor is the amount or dose that achieves the same level of P70 S6 kinase inhibition as does the reference dose or reference amount of a reference compound. In an embodiment, a bioequivalent amount or dose of an mTOR inhibitor is the amount or dose that achieves the same level of alteration in the ratio of PD-1 positive/PD-1 negative T cells as does the reference dose or reference amount of a reference compound.

[0348] The term “inhibition” or “inhibitor” includes a reduction in a certain parameter, e.g., an activity, of a given molecule, e.g., CD20, CD10, CD19, CD22, CD34, CD123, FLT-3, ROR1, CD79b, CD179b, or CD79a. For example, inhibition of an activity, e.g., an activity of CD20, CD10, CD19, CD22, CD34, CD123, FLT-3, ROR1, CD79b, CD179b, or CD79a, of at least 5%, 10%, 20%, 30%, 40%, or more is included by this term. Thus, inhibition need not be 100%. Activities for the inhibitors can be determined as described herein or by assays known in the art. A “B-cell inhibitor” is a molecule, e.g., a small molecule, antibody, CAR or cell comprising a CAR, which causes the reduction in a certain parameter, e.g., an activity, e.g., growth or proliferation, of a B-cell, or which causes a reduction in a certain parameter, e.g., an activity, of a molecule associated with a B cell. Non-limiting examples of molecules associated with a B cell include proteins expressed on the surface of B cells, e.g., CD20, CD10, CD19, CD22, CD34, CD123, FLT-3, ROR1, CD79b, CD179b, or CD79a.

[0349] The term “Chimeric Antigen Receptor” or alternatively a “CAR” refers to a set of polypeptides, typically two in the simplest embodiments, which when in an immune effector cell, provides the cell with specificity for a target cell, typically a cancer cell, and with intracellular signal generation. In some embodiments, a CAR comprises at least an extracellular antigen binding domain, a transmembrane domain and a cytoplasmic signaling domain (also referred to herein as “an intracellular signaling domain”) comprising a functional signaling domain derived from a stimulatory molecule and/or costimulatory molecule as defined below. In some embodiments, the set of polypeptides are in the same polypeptide chain, e.g., comprise a chimeric fusion protein. In some embodiments, the set of polypeptides are not contiguous with each other, e.g., are in different polypeptide chains. In some embodiments, the set of polypeptides include a dimerization switch that, upon the presence of a dimerization molecule, can couple the polypeptides to one another, e.g., can couple an antigen binding domain to an intracellular signaling domain. In one aspect, the stimulatory molecule of the CAR is the zeta chain associated with the T cell receptor complex (e.g., CD3 zeta). In one aspect, the cytoplasmic signaling domain comprises a primary signaling domain (e.g., a primary signaling domain of CD3-zeta). In one aspect, the cytoplasmic signaling domain further comprises one or more functional signaling domains derived from at least one costimulatory molecule as defined below. In one aspect, the costimulatory molecule is chosen from the costimulatory molecules described herein, e.g., 4-1BB (i.e., CD137), CD27, and/or CD28. In one aspect, the CAR comprises a chimeric fusion protein comprising an extracellular antigen binding domain, a transmembrane domain and an intracellular signaling domain comprising a functional signaling domain derived from a stimulatory molecule. In one aspect, the CAR comprises a chimeric fusion protein comprising an extracellular antigen binding domain, a transmembrane domain and an intracellular signaling domain comprising a functional signaling domain derived from a costimulatory molecule and a functional signaling domain derived from a stimulatory molecule. In one aspect, the CAR comprises a chimeric fusion protein comprising an extracellular antigen binding domain, a transmembrane domain and an intracellular signaling domain comprising two functional signaling domains derived from one or more costimulatory molecule(s) and a functional signaling domain derived from a stimulatory molecule. In one aspect, the CAR comprises a chimeric fusion protein comprising an extracellular antigen binding domain, a transmembrane domain and an intracellular signaling domain comprising at least two functional signaling domains derived from one or more costimulatory molecule(s) and a functional signaling domain derived from a stimulatory molecule. In one aspect the CAR comprises an optional leader sequence at the amino-terminus (N-ter) of the CAR fusion protein. In one aspect, the CAR further comprises a leader sequence at the N-terminus of the extracellular antigen binding domain, wherein the leader sequence is optionally cleaved from the antigen binding domain (e.g., a scFv) during cellular processing and localization of the CAR to the cellular membrane.

[0350] The phrase “disease associated with expression of CD20” as used herein includes but is not limited to, a disease associated with expression of CD20 (e.g., wild-type or mutant CD20) or condition associated with cells which express, or at any time expressed, CD20 (e.g., wild-type or mutant CD20) including, e.g., a proliferative disease such as a cancer or malignancy or a precancerous condition such as a myelodysplasia, a myelodysplastic syndrome or a preleukemia; or a noncancer related indication associated with cells which express CD20 (e.g., wild-type or mutant CD20). For the avoidance of doubt, a disease associated with expression of CD20 may include a condition associated with cells which do not presently express CD20, e.g., because CD20 expression has been downregulated, e.g., due to treatment with a molecule targeting CD20, e.g., a CD20 CAR, but which at one time expressed CD20. In one aspect, a cancer associated with expression of CD20 is a hematological cancer. In one aspect, a hematological cancer includes but is not limited to AML, myelodysplastic syndrome, ALL, hairy cell leukemia, Prolymphocytic leukemia, Chronic myeloid leukemia, Hodgkin lymphoma, Blastic plasmacytoid dendritic cell neoplasm, and the like. Further disease associated with expression of CD20 expression include, but are not limited to, e.g., atypical and/or non-classical cancers, malignancies, precancerous conditions or proliferative diseases associated with expression of CD20. Non-cancer related indications associated with expression of CD20 may also be included. In some embodiments, the CD20-expressing cells express, or at any time expressed, CD20 mRNA. In an embodiment, the CD20-expressing cells produce a CD20 protein (e.g., wild-type or mutant), and the CD20 protein may be present at normal levels or reduced levels. In an embodiment, the CD20-expressing cells produced detectable levels of a CD20 protein at one point, and subsequently produced substantially no detectable CD20 protein.

[0351] The phrase “disease associated with expression of CD22” as used herein includes but is not limited to, a disease associated with expression of CD22 (e.g., wild-type or mutant CD22) or condition associated with cells which express, or at any time expressed, CD22 (e.g., wild-type or mutant CD22) including, e.g., a proliferative disease such as a cancer or malignancy or a precancerous condition such as a myelodysplasia, a myelodysplastic syndrome or a preleukemia; or a noncancer related indication associated with cells which express CD22 (e.g., wild-type or mutant CD22). For the avoidance of doubt, a disease associated with expression of CD22 may include a condition associated with cells which do not presently express CD22, e.g., because CD22 expression has been downregulated, e.g., due to treatment with a molecule targeting CD22, e.g., a CD22 CAR, but which at one time expressed CD22. In one aspect, a cancer associated with expression of CD22 is a hematological cancer. In one aspect, a hematological cancer includes but is not limited to AML, myelodysplastic syndrome, ALL, hairy cell leukemia, Prolymphocytic leukemia, Chronic myeloid leukemia, Hodgkin lymphoma, Blastic plasmacytoid dendritic cell neoplasm, and the like. Further disease associated with expression of CD22 expression include, but are not limited to, e.g., atypical and/or non-classical cancers, malignancies, precancerous conditions or proliferative diseases associated with expression of CD22. Non-cancer related indications associated with expression of CD22 may also be included. In some embodiments, the CD22-expressing cells express, or at any time expressed, CD22 mRNA. In an embodiment, the CD22-expressing cells produce a CD22 protein (e.g., wild-type or mutant), and the CD22 protein may be present at normal levels or reduced levels. In an embodiment, the CD22-expressing cells produced detectable levels of a CD22 protein at one point, and subsequently produced substantially no detectable CD22 protein.

[0352] As used herein, unless otherwise specified, the terms “prevent,” “preventing” and “prevention” refer to an action that occurs before the subject begins to suffer from the condition, or relapse of the condition. Prevention need not result in a complete prevention of the condition; partial prevention or reduction of the condition or a symptom of the condition, or reduction of the risk of developing the condition, is encompassed by this term.

[0353] Administered “in combination”, as used herein, means that two (or more) different treatments are delivered to the subject during the course of the subject's affliction with the disorder, e.g., the two or more treatments are delivered after the subject has been diagnosed with the disorder and before the disorder has been cured or eliminated or treatment has ceased for other reasons. In some embodiments, the delivery of one treatment is still occurring when the delivery of the second begins, so that there is overlap in terms of administration. This is sometimes referred to herein as “simultaneous” or “concurrent delivery”. In other embodiments, the delivery of one treatment ends before the delivery of the other treatment begins. In some embodiments of either case, the treatment is more effective because of combined administration. For example, the second treatment is more effective, e.g., an equivalent effect is seen with less of the second treatment, or the second treatment reduces symptoms to a greater extent, than would be seen if the second treatment were administered in the absence of the first treatment, or the analogous situation is seen with the first treatment. In some embodiments, delivery is such that the reduction in a symptom, or other parameter related to the disorder is greater than what would be observed with one treatment delivered in the absence of the other. The effect of the two treatments can be partially additive, wholly additive, or greater than additive. The delivery can be such that an effect of the first treatment delivered is still detectable when the second is delivered. In one embodiment, the CAR-expressing cell is administered at a dose and/or dosing schedule described herein, and the B-cell inhibitor, or agent that enhances the activity of the CD19 CAR-expressing cell is administered at a dose and/or dosing schedule described herein.

[0354] “Derived from” as that term is used herein, indicates a relationship between a first and a second molecule. It generally refers to structural similarity between the first molecule and a second molecule and does not connote or include a process or source limitation on a first molecule that is derived from a second molecule. For example, in the case of an intracellular signaling domain that is derived from a CD3zeta molecule, the intracellular signaling domain retains sufficient CD3zeta structure such that is has the required function, namely, the ability to generate a signal under the appropriate conditions. It does not connote or include a limitation to a particular process of producing the intracellular signaling domain, e.g., it does not mean that, to provide the intracellular signaling domain, one must start with a CD3zeta sequence and delete unwanted sequence, or impose mutations, to arrive at the intracellular signaling domain.

[0355] The term “signaling domain” refers to the functional portion of a protein which acts by transmitting information within the cell to regulate cellular activity via defined signaling pathways by generating second messengers or functioning as effectors by responding to such messengers.

[0356] As used herein, the term “CD19” refers to the Cluster of Differentiation 19 protein, which is an antigenic determinant detectable on leukemia precursor cells. The human and murine amino acid and nucleic acid sequences can be found in a public database, such as GenBank, UniProt and Swiss-Prot. For example, the amino acid sequence of human CD19 can be found as UniProt/Swiss-Prot Accession No. P15391 and the nucleotide sequence encoding of the human CD19 can be found at Accession No. NM 001178098. As used herein, “CD19” includes proteins comprising mutations, e.g., point mutations, fragments, insertions, deletions and splice variants of full length wild-type CD19. CD19 is expressed on most B lineage cancers, including, e.g., acute lymphoblastic leukemia, chronic lymphocyte leukemia and non-Hodgkin lymphoma. Other cells with express CD19 are provided below in the definition of “disease associated with expression of CD19.” It is also an early marker of B cell progenitors. See, e.g., Nicholson et al. Mol. Immun. 34 (16-17): 1157-1165 (1997). In one aspect the antigen-binding portion of the CART recognizes and binds an antigen within the extracellular domain of the CD19 protein. In one aspect, the CD19 protein is expressed on a cancer cell.

[0357] The term “antibody,” as used herein, refers to a protein, or polypeptide sequence derived from an immunoglobulin molecule which specifically binds with an antigen. Antibodies can be polyclonal or monoclonal, multiple or single chain, or intact immunoglobulins, and may be derived from natural sources or from recombinant sources. Antibodies can be tetramers of immunoglobulin molecules.

[0358] The term “antibody fragment” refers to at least one portion of an antibody, that retains the ability to specifically interact with (e.g., by binding, steric hindrance, stabilizing/destabilizing, spatial distribution) an epitope of an antigen. Examples of antibody fragments include, but are not limited to, Fab, Fab′, F(ab′)₂, Fv fragments, scFv antibody fragments, disulfide-linked Fvs (sdFv), a Fd fragment consisting of the VH and CH1 domains, linear antibodies, single domain antibodies such as sdAb (either VL or VH), camelid VHH domains, multi-specific antibodies formed from antibody fragments such as a bivalent fragment comprising two Fab fragments linked by a disulfide bridge at the hinge region, and an isolated CDR or other epitope binding fragments of an antibody. An antigen binding fragment can also be incorporated into single domain antibodies, maxibodies, minibodies, nanobodies, intrabodies, diabodies, triabodies, tetrabodies, v-NAR and bis-scFv (see, e.g., Hollinger and Hudson, Nature Biotechnology 23:1126-1136, 2005). Antigen binding fragments can also be grafted into scaffolds based on polypeptides such as a fibronectin type III (Fn3)(see U.S. Pat. No. 6,703,199, which describes fibronectin polypeptide minibodies).

[0359] The term “scFv” refers to a fusion protein comprising at least one antibody fragment comprising a variable region of a light chain and at least one antibody fragment comprising a variable region of a heavy chain, wherein the light and heavy chain variable regions are contiguously linked, e.g., via a synthetic linker, e.g., a short flexible polypeptide linker, and capable of being expressed as a single chain polypeptide, and wherein the scFv retains the specificity of the intact antibody from which it is derived. Unless specified, as used herein an scFv may have the VL and VH variable regions in either order, e.g., with respect to the N-terminal and C-terminal ends of the polypeptide, the scFv may comprise VL-linker-VH or may comprise VH-linker-VL.

[0360] The term “complementarity determining region” or “CDR,” as used herein, refers to the sequences of amino acids within antibody variable regions which confer antigen specificity and binding affinity. For example, in general, there are three CDRs in each heavy chain variable region (e.g., HCDR1, HCDR2, and HCDR3) and three CDRs in each light chain variable region (LCDR1, LCDR2, and LCDR3). The precise amino acid sequence boundaries of a given CDR can be determined using any of a number of well-known schemes, including those described by Kabat et al. (1991), “Sequences of Proteins of Immunological Interest,” 5th Ed. Public Health Service, National Institutes of Health, Bethesda, MD (“Kabat” numbering scheme), Al-Lazikani et al., (1997) JMB 273,927-948 (“Chothia” numbering scheme), or a combination thereof. Under the Kabat numbering scheme, in some embodiments, the CDR amino acid residues in the heavy chain variable domain (VH) are numbered 31-35 (HCDR1), 50-65 (HCDR2), and 95-102 (HCDR3); and the CDR amino acid residues in the light chain variable domain (VL) are numbered 24-34 (LCDR1), 50-56 (LCDR2), and 89-97 (LCDR3). Under the Chothia numbering scheme, in some embodiments, the CDR amino acids in the VH are numbered 26-32 (HCDR1), 52-56 (HCDR2), and 95-102 (HCDR3); and the CDR amino acid residues in the VL are numbered 26-32 (LCDR1), 50-52 (LCDR2), and 91-96 (LCDR3). In a combined Kabat and Chothia numbering scheme, in some embodiments, the CDRs correspond to the amino acid residues that are part of a Kabat CDR, a Chothia CDR, or both. For instance, in some embodiments, the CDRs correspond to amino acid residues 26-35 (HCDR1), 50-65 (HCDR2), and 95-102 (HCDR3) in a VH, e.g., a mammalian VH, e.g., a human VH; and amino acid residues 24-34 (LCDR1), 50-56 (LCDR2), and 89-97 (LCDR3) in a VL, e.g., a mammalian VL, e.g., a human VL.

[0361] As used herein, the term “binding domain” or “antibody molecule” refers to a protein, e.g., an immunoglobulin chain or fragment thereof, comprising at least one immunoglobulin variable domain sequence. The term “binding domain” or “antibody molecule” encompasses antibodies and antibody fragments. In an embodiment, an antibody molecule is a multispecific antibody molecule, e.g., it comprises a plurality of immunoglobulin variable domain sequences, wherein a first immunoglobulin variable domain sequence of the plurality has binding specificity for a first epitope and a second immunoglobulin variable domain sequence of the plurality has binding specificity for a second epitope. In an embodiment, a multispecific antibody molecule is a bispecific antibody molecule. A bispecific antibody has specificity for no more than two antigens. A bispecific antibody molecule is characterized by a first immunoglobulin variable domain sequence which has binding specificity for a first epitope and a second immunoglobulin variable domain sequence that has binding specificity for a second epitope.

[0362] The portion of the CAR of the invention comprising an antibody or antibody fragment thereof may exist in a variety of forms where the antigen binding domain is expressed as part of a contiguous polypeptide chain including, for example, a single domain antibody fragment (sdAb), a single chain antibody (scFv), a humanized antibody, or bispecific antibody (Harlow et al., 1999, In: Using Antibodies: A Laboratory Manual, Cold Spring Harbor Laboratory Press, NY; Harlow et al., 1989, In: Antibodies: A Laboratory Manual, Cold Spring Harbor, New York; Houston et al., 1988, Proc. Natl. Acad. Sci. USA 85:5879-5883; Bird et al., 1988, Science 242:423-426). In one aspect, the antigen binding domain of a CAR composition of the invention comprises an antibody fragment. In a further aspect, the CAR comprises an antibody fragment that comprises a scFv.

[0363] The term “antibody heavy chain,” refers to the larger of the two types of polypeptide chains present in antibody molecules in their naturally occurring conformations, and which normally determines the class to which the antibody belongs.

[0364] The term “antibody light chain,” refers to the smaller of the two types of polypeptide chains present in antibody molecules in their naturally occurring conformations. Kappa (κ) and lambda (λ) light chains refer to the two major antibody light chain isotypes.

[0365] The term “recombinant antibody” refers to an antibody which is generated using recombinant DNA technology, such as, for example, an antibody expressed by a bacteriophage or yeast expression system. The term should also be construed to mean an antibody which has been generated by the synthesis of a DNA molecule encoding the antibody and which DNA molecule expresses an antibody protein, or an amino acid sequence specifying the antibody, wherein the DNA or amino acid sequence has been obtained using recombinant DNA or amino acid sequence technology which is available and well known in the art.

[0366] The term “antigen” or “Ag” refers to a molecule that provokes an immune response. This immune response may involve either antibody production, or the activation of specific immunologically-competent cells, or both. The skilled artisan will understand that any macromolecule, including virtually all proteins or peptides, can serve as an antigen. Furthermore, antigens can be derived from recombinant or genomic DNA. A skilled artisan will understand that any DNA, which comprises a nucleotide sequences or a partial nucleotide sequence encoding a protein that elicits an immune response therefore encodes an “antigen” as that term is used herein. Furthermore, one skilled in the art will understand that an antigen need not be encoded solely by a full length nucleotide sequence of a gene. It is readily apparent that the present invention includes, but is not limited to, the use of partial nucleotide sequences of more than one gene and that these nucleotide sequences are arranged in various combinations to encode polypeptides that elicit the desired immune response. Moreover, a skilled artisan will understand that an antigen need not be encoded by a “gene” at all. It is readily apparent that an antigen can be generated synthesized or can be derived from a biological sample, or might be macromolecule besides a polypeptide. Such a biological sample can include, but is not limited to a tissue sample, a tumor sample, a cell or a fluid with other biological components.

[0367] The terms “compete” or “cross-compete” are used interchangeably herein to refer to the ability of an antibody molecule to interfere with binding of an antibody molecule, e.g., an anti-CD20 or CD22 antibody molecule provided herein, to a target, e.g., human CD20 or CD22. The interference with binding can be direct or indirect (e.g., through an allosteric modulation of the antibody molecule or the target). The extent to which an antibody molecule is able to interfere with the binding of another antibody molecule to the target, and therefore whether it can be said to compete, can be determined using a competition binding assay, e.g., as described herein. In some embodiments, a competition binding assay is a quantitative competition assay. In some embodiments, a first antibody molecule is said to compete for binding to the target with a second antibody molecule when the binding of the first antibody molecule to the target is reduced by 10% or more, e.g., 20% or more, 30% or more, 40% or more, 50% or more, 55% or more, 60% or more, 65% or more, 70% or more, 75% or more, 80% or more, 85% or more, 90% or more, 95% or more, 98% or more, 99% or more in a competition binding assay (e.g., a competition assay described herein).

[0368] As used herein, the term “epitope” refers to the moieties of an antigen (e.g., human CD20 or CD22) that specifically interact with an antibody molecule. Such moieties, referred to herein as epitopic determinants, typically comprise, or are part of, elements such as amino acid side chains or sugar side chains. An epitopic determinate can be defined, e.g., by methods known in the art or disclosed herein, e.g., by crystallography or by hydrogen-deuterium exchange. At least one or some of the moieties on the antibody molecule, that specifically interact with an epitopic determinant, are typically located in a CDR(s). Typically an epitope has a specific three dimensional structural characteristics. Typically an epitope has specific charge characteristics. Some epitopes are linear epitopes while others are conformational epitopes.

[0369] The term “anti-cancer effect” refers to a biological effect which can be manifested by various means, including but not limited to, e.g., a decrease in tumor volume, a decrease in the number of cancer cells, a decrease in the number of metastases, an increase in life expectancy, decrease in cancer cell proliferation, decrease in cancer cell survival, or amelioration of various physiological symptoms associated with the cancerous condition. An “anti-cancer effect” can also be manifested by the ability of the peptides, polynucleotides, cells and antibodies described herein in prevention of the occurrence of cancer in the first place. The term “anti-tumor effect” refers to a biological effect which can be manifested by various means, including but not limited to, e.g., a decrease in tumor volume, a decrease in the number of tumor cells, a decrease in tumor cell proliferation, or a decrease in tumor cell survival.

[0370] The term “autologous” refers to any material derived from the same individual to whom it is later to be re-introduced into the individual.

[0371] The term “allogeneic” refers to any material derived from a different animal of the same species as the individual to whom the material is introduced. Two or more individuals are said to be allogeneic to one another when the genes at one or more loci are not identical. In some aspects, allogeneic material from individuals of the same species may be sufficiently unlike genetically to interact antigenically

[0372] The term “xenogeneic” refers to a graft derived from an animal of a different species.

[0373] The term “cancer” refers to a disease characterized by the uncontrolled growth of aberrant cells. Cancer cells can spread locally or through the bloodstream and lymphatic system to other parts of the body. Examples of various cancers are described herein and include but are not limited to, breast cancer, prostate cancer, ovarian cancer, cervical cancer, skin cancer, pancreatic cancer, colorectal cancer, renal cancer, liver cancer, brain cancer, lymphoma, leukemia, lung cancer and the like. The terms “tumor” and “cancer” are used interchangeably herein, e.g., both terms encompass solid and liquid, e.g., diffuse or circulating, tumors. As used herein, the term “cancer” or “tumor” includes premalignant, as well as malignant cancers and tumors.

[0374] The terms “cancer associated antigen” or “tumor antigen” or “proliferative disorder antigen” or “antigen associated with a proliferative disorder” interchangeably refers to a molecule (typically protein, carbohydrate or lipid) that is preferentially expressed on the surface of a cancer cell, either entirely or as a fragment (e.g., MHC/peptide), in comparison to a normal cell, and which is useful for the preferential targeting of a pharmacological agent to the cancer cell. In some embodiments, a tumor antigen is a marker expressed by both normal cells and cancer cells, e.g., a lineage marker, e.g., CD19 on B cells. In certain aspects, the tumor antigens of the present invention are derived from, cancers including but not limited to primary or metastatic melanoma, thymoma, lymphoma, sarcoma, lung cancer, liver cancer, non-Hodgkin lymphoma, Hodgkin lymphoma, leukemias, uterine cancer, cervical cancer, bladder cancer, kidney cancer and adenocarcinomas such as breast cancer, prostate cancer, ovarian cancer, pancreatic cancer, and the like. In some embodiments, the tumor antigen is an antigen that is common to a specific proliferative disorder. In some embodiments, a cancer-associated antigen is a cell surface molecule that is overexpressed in a cancer cell in comparison to a normal cell, for instance, 1-fold over expression, 2-fold overexpression, 3-fold overexpression or more in comparison to a normal cell. In some embodiments, a cancer-associated antigen is a cell surface molecule that is inappropriately synthesized in the cancer cell, for instance, a molecule that contains deletions, additions or mutations in comparison to the molecule expressed on a normal cell. In some embodiments, a cancer-associated antigen will be expressed exclusively on the cell surface of a cancer cell, entirely or as a fragment (e.g., MHC/peptide), and not synthesized or expressed on the surface of a normal cell. In some embodiments, the CARs of the present invention includes CARs comprising an antigen binding domain (e.g., antibody or antibody fragment) that binds to a MHC presented peptide. Normally, peptides derived from endogenous proteins fill the pockets of Major histocompatibility complex (MHC) class I molecules, and are recognized by T cell receptors (TCRs) on CD8+ T lymphocytes. The MHC class I complexes are constitutively expressed by all nucleated cells. In cancer, virus-specific and/or tumor-specific peptide/MHC complexes represent a unique class of cell surface targets for immunotherapy. TCR-like antibodies targeting peptides derived from viral or tumor antigens in the context of human leukocyte antigen (HLA)-A1 or HLA-A2 have been described (see, e.g., Sastry et al., J Virol. 2011 85(5):1935-1942; Sergeeva et al., Blood, 2011 117(16):4262-4272; Verma et al., J Immunol 2010 184(4):2156-2165; Willemsen et al., Gene Ther 2001 8(21):1601-1608; Dao et al., Sci Transl Med 2013 5(176):176ra33; Tassev et al., Cancer Gene Ther 2012 19(2):84-100). For example, TCR-like antibody can be identified from screening a library, such as a human scFv phage displayed library.

[0375] The phrase “disease associated with expression of CD19” includes, but is not limited to, a disease associated with expression of CD19 (e.g., wild-type or mutant CD19) or condition associated with cells which express, or at any time expressed, CD19 (e.g., wild-type or mutant CD19) including, e.g., proliferative diseases such as a cancer or malignancy or a precancerous condition such as a myelodysplasia, a myelodysplastic syndrome or a preleukemia; or a noncancer related indication associated with cells which express CD19. For the avoidance of doubt, a disease associated with expression of CD19 may include a condition associated with cells which do not presently express CD19, e.g., because CD19 expression has been downregulated, e.g., due to treatment with a molecule targeting CD19, e.g., a CD19 CAR, but which at one time expressed CD19. In one aspect, a cancer associated with expression of CD19 is a hematological cancer. In one aspect, the hematological cancer is a leukemia or a lymphoma. In one aspect, a cancer associated with expression of CD19 includes cancers and malignancies including, but not limited to, e.g., one or more acute leukemias including but not limited to, e.g., B-cell acute Lymphoid Leukemia (BALL), T-cell acute Lymphoid Leukemia (TALL), acute lymphoid leukemia (ALL); one or more chronic leukemias including but not limited to, e.g., chronic myelogenous leukemia (CIVIL), Chronic Lymphoid Leukemia (CLL). Additional cancers or hematologic conditions associated with expression of CD19 comprise, but are not limited to, e.g., B cell prolymphocytic leukemia, blastic plasmacytoid dendritic cell neoplasm, Burkitt's lymphoma, diffuse large B cell lymphoma, Follicular lymphoma, Hairy cell leukemia, small cell- or a large cell-follicular lymphoma, malignant lymphoproliferative conditions, MALT lymphoma, mantle cell lymphoma (MCL), Marginal zone lymphoma, multiple myeloma, myelodysplasia and myelodysplastic syndrome, non-Hodgkin lymphoma, Hodgkin lymphoma, plasmablastic lymphoma, plasmacytoid dendritic cell neoplasm, Waldenstrom macroglobulinemia, and “preleukemia” which are a diverse collection of hematological conditions united by ineffective production (or dysplasia) of myeloid blood cells, and the like. Further diseases associated with expression of CD19 expression include, but not limited to, e.g., atypical and/or non-classical cancers, malignancies, precancerous conditions or proliferative diseases associated with expression of CD19. Non-cancer related indications associated with expression of CD19 include, but are not limited to, e.g., autoimmune disease, (e.g., lupus), inflammatory disorders (allergy and asthma) and transplantation. In some embodiments, the CD19-expressing cells express, or at any time expressed, CD19 mRNA. In an embodiment, the CD19-expressing cells produce a CD19 protein (e.g., wild-type or mutant), and the CD19 protein may be present at normal levels or reduced levels. In an embodiment, the CD19-expressing cells produced detectable levels of a CD19 protein at one point, and subsequently produced substantially no detectable CD19 protein.

[0376] The term “conservative sequence modifications” refers to amino acid modifications that do not significantly affect or alter the binding characteristics of the antibody or antibody fragment containing the amino acid sequence. Such conservative modifications include amino acid substitutions, additions and deletions. Modifications can be introduced into an antibody or antibody fragment of the invention by standard techniques known in the art, such as site-directed mutagenesis and PCR-mediated mutagenesis. Conservative amino acid substitutions are ones in which the amino acid residue is replaced with an amino acid residue having a similar side chain. Families of amino acid residues having similar side chains have been defined in the art. These families include amino acids with basic side chains (e.g., lysine, arginine, histidine), acidic side chains (e.g., aspartic acid, glutamic acid), uncharged polar side chains (e.g., glycine, asparagine, glutamine, serine, threonine, tyrosine, cysteine, tryptophan), nonpolar side chains (e.g., alanine, valine, leucine, isoleucine, proline, phenylalanine, methionine), beta-branched side chains (e.g., threonine, valine, isoleucine) and aromatic side chains (e.g., tyrosine, phenylalanine, tryptophan, histidine). Thus, one or more amino acid residues within a CAR of the invention can be replaced with other amino acid residues from the same side chain family and the altered CAR can be tested using the functional assays described herein.

[0377] The term “stimulation,” refers to a primary response induced by binding of a stimulatory molecule (e.g., a TCR/CD3 complex or CAR) with its cognate ligand (or tumor antigen in the case of a CAR) thereby mediating a signal transduction event, such as, but not limited to, signal transduction via the TCR/CD3 complex or signal transduction via the appropriate NK receptor or signaling domains of the CAR. Stimulation can mediate altered expression of certain molecules.

[0378] The term “stimulatory molecule,” refers to a molecule expressed by an immune cell, e.g., T cell, NK cell, or B cell) that provides the cytoplasmic signaling sequence(s) that regulate activation of the immune cell in a stimulatory way for at least some aspect of the immune cell signaling pathway. In one aspect, the signal is a primary signal that is initiated by, for instance, binding of a TCR/CD3 complex with an MEW molecule loaded with peptide, and which leads to mediation of a T cell response, including, but not limited to, proliferation, activation, differentiation, and the like. A primary cytoplasmic signaling sequence (also referred to as a “primary signaling domain”) that acts in a stimulatory manner may contain a signaling motif which is known as immunoreceptor tyrosine-based activation motif or ITAM. Examples of an ITAM containing cytoplasmic signaling sequence that is of particular use in the invention includes, but is not limited to, those derived from CD3 zeta, common FcR gamma (FCER1G), Fc gamma RIIa, FcR beta (Fc Epsilon Rib), CD3 gamma, CD3 delta, CD3 epsilon, CD79a, CD79b, DAP10, and DAP12. In a specific CAR of the invention, the intracellular signaling domain in any one or more CARS of the invention comprises an intracellular signaling sequence, e.g., a primary signaling sequence of CD3-zeta. In a specific CAR of the invention, the primary signaling sequence of CD3-zeta is the sequence provided as SEQ ID NO:17, or the equivalent residues from a non-human species, e.g., mouse, rodent, monkey, ape and the like. In a specific CAR of the invention, the primary signaling sequence of CD3-zeta is the sequence as provided in SEQ ID NO:43, or the equivalent residues from a non-human species, e.g., mouse, rodent, monkey, ape and the like.

[0379] The term “antigen presenting cell” or “APC” refers to an immune system cell such as an accessory cell (e.g., a B-cell, a dendritic cell, and the like) that displays a foreign antigen complexed with major histocompatibility complexes (WIC's) on its surface. T-cells may recognize these complexes using their T-cell receptors (TCRs). APCs process antigens and present them to T-cells.

[0380] “Immune effector cell,” as that term is used herein, refers to a cell that is involved in an immune response, e.g., in the promotion of an immune effector response. Examples of immune effector cells include T cells, e.g., alpha/beta T cells and gamma/delta T cells, B cells, natural killer (NK) cells, natural killer T (NK-T) cells, mast cells, and myeloid-derived phagocytes.

[0381] “Immune effector function or immune effector response,” as that term is used herein, refers to function or response, e.g., of an immune effector cell, that enhances or promotes an immune attack of a target cell. E.g., an immune effector function or response refers a property of a T or NK cell that promotes killing or the inhibition of growth or proliferation, of a target cell. In the case of a T cell, primary stimulation and co-stimulation are examples of immune effector function or response.

[0382] The term “effector function” refers to a specialized function of a cell. Effector function of a T cell, for example, may be cytolytic activity or helper activity including the secretion of cytokines.

[0383] An “intracellular signaling domain,” as the term is used herein, refers to an intracellular portion of a molecule. The intracellular signaling domain can generate a signal that promotes an immune effector function of the CAR containing cell, e.g., a CART cell. Examples of immune effector function, e.g., in a CART cell, include cytolytic activity and helper activity, including the secretion of cytokines. In embodiments, the intracellular signal domain is the portion of the protein which transduces the effector function signal and directs the cell to perform a specialized function. While the entire intracellular signaling domain can be employed, in many cases it is not necessary to use the entire chain. To the extent that a truncated portion of the intracellular signaling domain is used, such truncated portion may be used in place of the intact chain as long as it transduces the effector function signal. The term intracellular signaling domain is thus meant to include any truncated portion of the intracellular signaling domain sufficient to transduce the effector function signal.

[0384] In an embodiment, the intracellular signaling domain can comprise a primary intracellular signaling domain. Exemplary primary intracellular signaling domains include those derived from the molecules responsible for primary stimulation, or antigen dependent simulation. In an embodiment, the intracellular signaling domain can comprise a costimulatory intracellular domain. Exemplary costimulatory intracellular signaling domains include those derived from molecules responsible for costimulatory signals, or antigen independent stimulation. For example, in the case of a CART, a primary intracellular signaling domain can comprise a cytoplasmic sequence of a T cell receptor, and a costimulatory intracellular signaling domain can comprise cytoplasmic sequence from co-receptor or costimulatory molecule.

[0385] A primary intracellular signaling domain can comprise a signaling motif which is known as an immunoreceptor tyrosine-based activation motif or ITAM. Examples of ITAM containing primary cytoplasmic signaling sequences include, but are not limited to, those derived from CD3 zeta, FcR gamma, common FcR gamma (FCER1G), Fc gamma RIIa, FcR beta (Fc Epsilon Rib), CD3 gamma, CD3 delta, CD3 epsilon, CD22, CD79a, CD79b, CD278 (“ICOS”), FcεRI, CD66d, CD32, DAP10 and DAP12.

[0386] The term “zeta” or alternatively “zeta chain”, “CD3-zeta” or “TCR-zeta” is defined as the protein provided as GenBank Acc. No. BAG36664.1, or the equivalent residues from a non-human species, e.g., mouse, rodent, monkey, ape and the like, and a “zeta stimulatory domain” or alternatively a “CD3-zeta stimulatory domain” or a “TCR-zeta stimulatory domain” is defined as the amino acid residues from the cytoplasmic domain of the zeta chain, or functional derivatives thereof, that are sufficient to functionally transmit an initial signal necessary for T cell activation. In one aspect the cytoplasmic domain of zeta comprises residues 52 through 164 of GenBank Acc. No. BAG36664.1 or the equivalent residues from a non-human species, e.g., mouse, rodent, monkey, ape and the like, that are functional orthologs thereof. In one aspect, the “zeta stimulatory domain” or a “CD3-zeta stimulatory domain” is the sequence provided as SEQ ID NO:17. In one aspect, the “zeta stimulatory domain” or a “CD3-zeta stimulatory domain” is the sequence provided as SEQ ID NO:43.

[0387] The term “costimulatory molecule” refers to the cognate binding partner on a T cell that specifically binds with a costimulatory ligand, thereby mediating a costimulatory response by the T cell, such as, but not limited to, proliferation. Costimulatory molecules are cell surface molecules other than antigen receptors or their ligands that contribute to an efficient immune response. Costimulatory molecules include, but are not limited to an MHC class I molecule, TNF receptor proteins, Immunoglobulin-like proteins, cytokine receptors, integrins, signalling lymphocytic activation molecules (SLAM proteins), activating NK cell receptors, BTLA, a Toll ligand receptor, OX40, CD2, CD7, CD27, CD28, CD30, CD40, ICAM-1, LFA-1 (CD11a/CD18), 4-1BB (CD137), B7-H3, ICAM-1, ICOS (CD278), GITR, BAFFR, LIGHT, HVEM (LIGHTR), KIRDS2, SLAMF7, NKp80 (KLRF1), NKp44, NKp30, NKp46, CD19, CD4, CD8alpha, CD8beta, IL2R beta, IL2R gamma, IL7R alpha, ITGA4, VLA1, CD49a, ITGA4, IA4, CD49D, ITGA6, VLA-6, CD49f, ITGAD, CD11d, ITGAE, CD103, ITGAL, CD11a, LFA-1, ITGAM, CD11b, ITGAX, CD11c, ITGB1, CD29, ITGB2, CD18, LFA-1, ITGB7, NKG2D, NKG2C, TNFR2, TRANCE/RANKL, DNAM1 (CD226), SLAMF4 (CD244, 2B4), CD84, CD96 (Tactile), CEACAM1, CRTAM, Ly9 (CD229), CD160 (BY55), PSGL1, CD100 (SEMA4D), CD69, SLAMF6 (NTB-A, Ly108), SLAM (SLAMF1, CD150, IPO-3), BLAME (SLAMF8), SELPLG (CD162), LTBR, LAT, GADS, SLP-76, PAG/Cbp, CD19a, and a ligand that specifically binds with CD83.

[0388] A costimulatory intracellular signaling domain refers to the intracellular portion of a costimulatory molecule. The intracellular signaling domain can comprise the entire intracellular portion, or the entire native intracellular signaling domain, of the molecule from which it is derived, or a functional fragment or derivative thereof.

[0389] The term “4-1BB” refers to a member of the TNFR superfamily with an amino acid sequence provided as GenBank Acc. No. AAA62478.2, or the equivalent residues from a non-human species, e.g., mouse, rodent, monkey, ape and the like; and a “4-1BB costimulatory domain” is defined as amino acid residues 214-255 of GenBank Acc. No. AAA62478.2, or the equivalent residues from a non-human species, e.g., mouse, rodent, monkey, ape and the like. In one aspect, the “4-1BB costimulatory domain” is the sequence provided as SEQ ID NO:16 or the equivalent residues from a non-human species, e.g., mouse, rodent, monkey, ape and the like.

[0390] The term “encoding” refers to the inherent property of specific sequences of nucleotides in a polynucleotide, such as a gene, a cDNA, or an mRNA, to serve as templates for synthesis of other polymers and macromolecules in biological processes having either a defined sequence of nucleotides (e.g., rRNA, tRNA and mRNA) or a defined sequence of amino acids and the biological properties resulting therefrom. Thus, a gene, cDNA, or RNA, encodes a protein if transcription and translation of mRNA corresponding to that gene produces the protein in a cell or other biological system. Both the coding strand, the nucleotide sequence of which is identical to the mRNA sequence and is usually provided in sequence listings, and the non-coding strand, used as the template for transcription of a gene or cDNA, can be referred to as encoding the protein or other product of that gene or cDNA.

[0391] Unless otherwise specified, a “nucleotide sequence encoding an amino acid sequence” includes all nucleotide sequences that are degenerate versions of each other and that encode the same amino acid sequence. The phrase nucleotide sequence that encodes a protein or a RNA may also include introns to the extent that the nucleotide sequence encoding the protein may in some version contain an intron(s).

[0392] The term “effective amount” or “therapeutically effective amount” are used interchangeably herein, and refer to an amount of a compound, formulation, material, or composition, as described herein effective to achieve a particular biological result.

[0393] The term “endogenous” refers to any material from or produced inside an organism, cell, tissue or system.

[0394] The term “exogenous” refers to any material introduced from or produced outside an organism, cell, tissue or system.

[0395] The term “expression” refers to the transcription and/or translation of a particular nucleotide sequence driven by a promoter.

[0396] The term “transfer vector” refers to a composition of matter which comprises an isolated nucleic acid and which can be used to deliver the isolated nucleic acid to the interior of a cell. Numerous vectors are known in the art including, but not limited to, linear polynucleotides, polynucleotides associated with ionic or amphiphilic compounds, plasmids, and viruses. Thus, the term “transfer vector” includes an autonomously replicating plasmid or a virus. The term should also be construed to further include non-plasmid and non-viral compounds which facilitate transfer of nucleic acid into cells, such as, for example, a polylysine compound, liposome, and the like. Examples of viral transfer vectors include, but are not limited to, adenoviral vectors, adeno-associated virus vectors, retroviral vectors, lentiviral vectors, and the like.

[0397] The term “expression vector” refers to a vector comprising a recombinant polynucleotide comprising expression control sequences operatively linked to a nucleotide sequence to be expressed. An expression vector comprises sufficient cis-acting elements for expression; other elements for expression can be supplied by the host cell or in an in vitro expression system. Expression vectors include all those known in the art, including cosmids, plasmids (e.g., naked or contained in liposomes) and viruses (e.g., lentiviruses, retroviruses, adenoviruses, and adeno-associated viruses) that incorporate the recombinant polynucleotide.

[0398] The term “lentivirus” refers to a genus of the Retroviridae family. Lentiviruses are unique among the retroviruses in being able to infect non-dividing cells; they can deliver a significant amount of genetic information into the DNA of the host cell, so they are one of the most efficient methods of a gene delivery vector. HIV, SIV, and FIV are all examples of lentiviruses.

[0399] The term “lentiviral vector” refers to a vector derived from at least a portion of a lentivirus genome, including especially a self-inactivating lentiviral vector as provided in Milone et al., Mol. Ther. 17(8): 1453-1464 (2009). Other examples of lentivirus vectors that may be used in the clinic, include but are not limited to, e.g., the LENTIVECTOR® gene delivery technology from Oxford BioMedica, the LENTIMAX™ vector system from Lentigen and the like. Nonclinical types of lentiviral vectors are also available and would be known to one skilled in the art.

[0400] The term “homologous” or “identity” refers to the subunit sequence identity between two polymeric molecules, e.g., between two nucleic acid molecules, such as, two DNA molecules or two RNA molecules, or between two polypeptide molecules. When a subunit position in both of the two molecules is occupied by the same monomeric subunit; e.g., if a position in each of two DNA molecules is occupied by adenine, then they are homologous or identical at that position. The homology between two sequences is a direct function of the number of matching or homologous positions; e.g., if half (e.g., five positions in a polymer ten subunits in length) of the positions in two sequences are homologous, the two sequences are 50% homologous; if 90% of the positions (e.g., 9 of 10), are matched or homologous, the two sequences are 90% homologous.

[0401] “Humanized” forms of non-human (e.g., murine) antibodies are chimeric immunoglobulins, immunoglobulin chains or fragments thereof (such as Fv, Fab, Fab′, F(ab′)2 or other antigen-binding subsequences of antibodies) which contain minimal sequence derived from non-human immunoglobulin. For the most part, humanized antibodies and antibody fragments thereof are human immunoglobulins (recipient antibody or antibody fragment) in which residues from a complementarity-determining region (CDR) of the recipient are replaced by residues from a CDR of a non-human species (donor antibody) such as mouse, rat or rabbit having the desired specificity, affinity, and capacity. In some instances, Fv framework region (FR) residues of the human immunoglobulin are replaced by corresponding non-human residues. Furthermore, a humanized antibody/antibody fragment can comprise residues which are found neither in the recipient antibody nor in the imported CDR or framework sequences. These modifications can further refine and optimize antibody or antibody fragment performance. In general, the humanized antibody or antibody fragment thereof will comprise substantially all of at least one, and typically two, variable domains, in which all or substantially all of the CDR regions correspond to those of a non-human immunoglobulin and all or a significant portion of the FR regions are those of a human immunoglobulin sequence. The humanized antibody or antibody fragment can also comprise at least a portion of an immunoglobulin constant region (Fc), typically that of a human immunoglobulin. For further details, see Jones et al., Nature, 321: 522-525, 1986; Reichmann et al., Nature, 332: 323-329, 1988; Presta, Curr. Op. Struct. Biol., 2: 593-596, 1992.

[0402] “Fully human” refers to an immunoglobulin, such as an antibody or antibody fragment, where the whole molecule is of human origin or consists of an amino acid sequence identical to a human form of the antibody or immunoglobulin.

[0403] The term “isolated” means altered or removed from the natural state. For example, a nucleic acid or a peptide naturally present in a living animal is not “isolated,” but the same nucleic acid or peptide partially or completely separated from the coexisting materials of its natural state is “isolated.” An isolated nucleic acid or protein can exist in substantially purified form, or can exist in a non-native environment such as, for example, a host cell.

[0404] In the context of the present invention, the following abbreviations for the commonly occurring nucleic acid bases are used. “A” refers to adenosine, “C” refers to cytosine, “G” refers to guanosine, “T” refers to thymidine, and “U” refers to uridine.

[0405] The term “operably linked” or “transcriptional control” refers to functional linkage between a regulatory sequence and a heterologous nucleic acid sequence resulting in expression of the latter. For example, a first nucleic acid sequence is operably linked with a second nucleic acid sequence when the first nucleic acid sequence is placed in a functional relationship with the second nucleic acid sequence. For instance, a promoter is operably linked to a coding sequence if the promoter affects the transcription or expression of the coding sequence. Operably linked DNA sequences can be contiguous with each other and, e.g., where necessary to join two protein coding regions, are in the same reading frame.

[0406] The term “parenteral” administration of an immunogenic composition includes, e.g., subcutaneous (s.c.), intravenous (i.v.), intramuscular (i.m.), or intrasternal injection, intratumoral, or infusion techniques.

[0407] The term “nucleic acid” or “polynucleotide” refers to deoxyribonucleic acids (DNA) or ribonucleic acids (RNA) and polymers thereof in either single- or double-stranded form. The term “nucleic acid” includes a gene, cDNA, or an mRNA. In one embodiment, the nucleic acid molecule is synthetic (e.g., chemically synthesized) or recombinant. Unless specifically limited, the term encompasses nucleic acids containing analogues or derivatives of natural nucleotides that have similar binding properties as the reference nucleic acid and are metabolized in a manner similar to naturally occurring nucleotides. Unless otherwise indicated, a particular nucleic acid sequence also implicitly encompasses conservatively modified variants thereof (e.g., degenerate codon substitutions), alleles, orthologs, SNPs, and complementary sequences as well as the sequence explicitly indicated. Specifically, degenerate codon substitutions may be achieved by generating sequences in which the third position of one or more selected (or all) codons is substituted with mixed-base and/or deoxyinosine residues (Batzer et al., Nucleic Acid Res. 19:5081 (1991); Ohtsuka et al., J. Biol. Chem. 260:2605-2608 (1985); and Rossolini et al., Mol. Cell. Probes 8:91-98 (1994)).

[0408] The terms “peptide,” “polypeptide,” and “protein” are used interchangeably, and refer to a compound comprised of amino acid residues covalently linked by peptide bonds. A protein or peptide must contain at least two amino acids, and no limitation is placed on the maximum number of amino acids that can comprise a protein's or peptide's sequence. Polypeptides include any peptide or protein comprising two or more amino acids joined to each other by peptide bonds. As used herein, the term refers to both short chains, which also commonly are referred to in the art as peptides, oligopeptides and oligomers, for example, and to longer chains, which generally are referred to in the art as proteins, of which there are many types. “Polypeptides” include, for example, biologically active fragments, substantially homologous polypeptides, oligopeptides, homodimers, heterodimers, variants of polypeptides, modified polypeptides, derivatives, analogs, fusion proteins, among others. A polypeptide includes a natural peptide, a recombinant peptide, or a combination thereof.

[0409] The term “promoter” refers to a DNA sequence recognized by the synthetic machinery of the cell, or introduced synthetic machinery, required to initiate the specific transcription of a polynucleotide sequence.

[0410] The term “promoter/regulatory sequence” refers to a nucleic acid sequence which is required for expression of a gene product operably linked to the promoter/regulatory sequence. In some instances, this sequence may be the core promoter sequence and in other instances, this sequence may also include an enhancer sequence and other regulatory elements which are required for expression of the gene product. The promoter/regulatory sequence may, for example, be one which expresses the gene product in a tissue specific manner.

[0411] The term “constitutive” promoter refers to a nucleotide sequence which, when operably linked with a polynucleotide which encodes or specifies a gene product, causes the gene product to be produced in a cell under most or all physiological conditions of the cell.

[0412] The term “inducible” promoter refers to a nucleotide sequence which, when operably linked with a polynucleotide which encodes or specifies a gene product, causes the gene product to be produced in a cell substantially only when an inducer which corresponds to the promoter is present in the cell.

[0413] The term “tissue-specific” promoter refers to a nucleotide sequence which, when operably linked with a polynucleotide encodes or specified by a gene, causes the gene product to be produced in a cell substantially only if the cell is a cell of the tissue type corresponding to the promoter.

[0414] The term “flexible polypeptide linker” or “linker” as used in the context of a scFv refers to a peptide linker that consists of amino acids such as glycine and/or serine residues used alone or in combination, to link variable heavy and variable light chain regions together. In one embodiment, the flexible polypeptide linker is a Gly/Ser linker and comprises the amino acid sequence (Gly-Gly-Gly-Ser)n, where n is a positive integer equal to or greater than 1. For example, n=1, n=2, n=3. n=4, n=5, n=6, n=7, n=8, n=9 and n=10 (SEQ ID NO:105). In one embodiment, the flexible polypeptide linkers include, but are not limited to, (Gly₄ Ser)₄ (SEQ ID NO:106) or (Gly₄ Ser)₃ (SEQ ID NO:107). In another embodiment, the linkers include multiple repeats of (Gly₂Ser), (GlySer) or (Gly₃Ser) (SEQ ID NO:108). Also included within the scope of the invention are linkers described in WO2012/138475, incorporated herein by reference.

[0415] As used herein, a 5′ cap (also termed an RNA cap, an RNA 7-methylguanosine cap or an RNA m⁷G cap) is a modified guanine nucleotide that has been added to the “front” or 5′ end of a eukaryotic messenger RNA shortly after the start of transcription. The 5′ cap consists of a terminal group which is linked to the first transcribed nucleotide. Its presence is important for recognition by the ribosome and protection from RNases. Cap addition is coupled to transcription, and occurs co-transcriptionally, such that each influences the other. Shortly after the start of transcription, the 5′ end of the mRNA being synthesized is bound by a cap-synthesizing complex associated with RNA polymerase. This enzymatic complex catalyzes the chemical reactions that are required for mRNA capping. Synthesis proceeds as a multi-step biochemical reaction. The capping moiety can be modified to modulate functionality of mRNA such as its stability or efficiency of translation.

[0416] As used herein, “in vitro transcribed RNA” refers to RNA, e.g., mRNA, that has been synthesized in vitro. Generally, the in vitro transcribed RNA is generated from an in vitro transcription vector. The in vitro transcription vector comprises a template that is used to generate the in vitro transcribed RNA.

[0417] As used herein, a “poly(A)” is a series of adenosines attached by polyadenylation to the mRNA. In some embodiments of a construct for transient expression, the polyA is between 50 and 5000 (SEQ ID NO: 28), e.g., greater than 64, e.g., greater than 100, e.g., than 300 or 400. Poly(A) sequences can be modified chemically or enzymatically to modulate mRNA functionality such as localization, stability or efficiency of translation.

[0418] As used herein, “polyadenylation” refers to the covalent linkage of a polyadenylyl moiety, or its modified variant, to a messenger RNA molecule. In eukaryotic organisms, most messenger RNA (mRNA) molecules are polyadenylated at the 3′ end. The 3′ poly(A) tail is a long sequence of adenine nucleotides (often several hundred) added to the pre-mRNA through the action of an enzyme, polyadenylate polymerase. In higher eukaryotes, the poly(A) tail is added onto transcripts that contain a specific sequence, the polyadenylation signal. The poly(A) tail and the protein bound to it aid in protecting mRNA from degradation by exonucleases. Polyadenylation is also important for transcription termination, export of the mRNA from the nucleus, and translation. Polyadenylation occurs in the nucleus immediately after transcription of DNA into RNA, but additionally can also occur later in the cytoplasm. After transcription has been terminated, the mRNA chain is cleaved through the action of an endonuclease complex associated with RNA polymerase. The cleavage site is usually characterized by the presence of the base sequence AAUAAA near the cleavage site. After the mRNA has been cleaved, adenosine residues are added to the free 3′ end at the cleavage site.

[0419] As used herein, “transient” refers to expression of a non-integrated transgene for a period of hours, days or weeks, wherein the period of time of expression is less than the period of time for expression of the gene if integrated into the genome or contained within a stable plasmid replicon in the host cell.

[0420] The term “signal transduction pathway” refers to the biochemical relationship between a variety of signal transduction molecules that play a role in the transmission of a signal from one portion of a cell to another portion of a cell. The phrase “cell surface receptor” includes molecules and complexes of molecules capable of receiving a signal and transmitting signal across the membrane of a cell.

[0421] The term “subject” is intended to include living organisms in which an immune response can be elicited (e.g., mammals, human).

[0422] The term, a “substantially purified” cell refers to a cell that is essentially free of other cell types. A substantially purified cell also refers to a cell which has been separated from other cell types with which it is normally associated in its naturally occurring state. In some instances, a population of substantially purified cells refers to a homogenous population of cells. In other instances, this term refers simply to cell that have been separated from the cells with which they are naturally associated in their natural state. In some aspects, the cells are cultured in vitro. In other aspects, the cells are not cultured in vitro.

[0423] The term “therapeutic” as used herein means a treatment. A therapeutic effect is obtained by reduction, suppression, remission, or eradication of a disease state.

[0424] The term “prophylaxis” as used herein means the prevention of or protective treatment for a disease or disease state.

[0425] In the context of the present invention, “tumor antigen” or “hyperproliferative disorder antigen” or “antigen associated with a hyperproliferative disorder” refers to antigens that are common to specific hyperproliferative disorders. In certain aspects, the hyperproliferative disorder antigens of the present invention are derived from, cancers including but not limited to primary or metastatic melanoma, thymoma, lymphoma, sarcoma, lung cancer, liver cancer, non-Hodgkin lymphoma, Hodgkin lymphoma, leukemias, uterine cancer, cervical cancer, bladder cancer, kidney cancer and adenocarcinomas such as breast cancer, prostate cancer, ovarian cancer, pancreatic cancer, and the like.

[0426] The term “transfected” or “transformed” or “transduced” refers to a process by which exogenous nucleic acid is transferred or introduced into the host cell. A “transfected” or “transformed” or “transduced” cell is one which has been transfected, transformed or transduced with exogenous nucleic acid. The cell includes the primary subject cell and its progeny.

[0427] A subject “responds” to treatment if a parameter of a cancer (e.g., a hematological cancer, e.g., cancer cell growth, proliferation and/or survival) in the subject is retarded or reduced by a detectable amount, e.g., about 5%, 10%, 20%, 30%, 40%, 50%, 60%, 70%, 80%, 90% or more as determined by any appropriate measure, e.g., by mass, cell count or volume. In one example, a subject responds to treatment if the subject experiences a life expectancy extended by about 5%, 10%, 20%, 30%, 40%, 50% or more beyond the life expectancy predicted if no treatment is administered. In another example, a subject responds to treatment, if the subject has an increased disease-free survival, overall survival or increased time to progression. Several methods can be used to determine if a patient responds to a treatment including, for example, criteria provided by NCCN Clinical Practice Guidelines in Oncology (NCCN Guidelines®). For example, in the context of B-ALL, a complete response or complete responder, may involve one or more of: <5% BM blast, >1000 neutrophil/ANC (/μL). >100,000 platelets (/μL) with no circulating blasts or extramedullary disease (no lymphadenopathy, splenomegaly, skin/gum infiltration/testicular mass/CNS involvement), Trilineage hematopoiesis, and no recurrence for 4 weeks. A partial responder may involve one or more of >50% reduction in BM blast, >1000 neutrophil/ANC (/μL). >100,000 platelets (/μL). A non-responder can show disease progression, e.g., >25% in BM blasts.

[0428] “Refractory” as used herein refers to a disease, e.g., cancer, that does not respond to a treatment. In embodiments, a refractory cancer can be resistant to a treatment before or at the beginning of the treatment. In other embodiments, the refractory cancer can become resistant during a treatment. A refractory cancer is also called a resistant cancer.

[0429] The term “relapse” as used herein refers to reappearance of a cancer after an initial period of responsiveness (e.g., complete response or partial response). The initial period of responsiveness may involve the level of cancer cells falling below a certain threshold, e.g., below 20%, 1%, 10%, 5%, 4%, 3%, 2%, or 1%. The reappearance may involve the level of cancer cells rising above a certain threshold, e.g., above 20%, 1%, 10%, 5%, 4%, 3%, 2%, or 1%. For example, e.g., in the context of B-ALL, the reappearance may involve, e.g., a reappearance of blasts in the blood, bone marrow (>5%), or any extramedullary site, after a complete response. A complete response, in this context, may involve <5% BM blast. More generally, in an embodiment, a response (e.g., complete response or partial response) can involve the absence of detectable MRD (minimal residual disease). In an embodiment, the initial period of responsiveness lasts at least 1, 2, 3, 4, 5, or 6 days; at least 1, 2, 3, or 4 weeks; at least 1, 2, 3, 4, 6, 8, 10, or 12 months; or at least 1, 2, 3, 4, or 5 years.

[0430] In some embodiments, a therapy that includes a CD19 inhibitor, e.g., a CD19 CAR therapy, may relapse or be refractory to treatment. The relapse or resistance can be caused by CD19 loss (e.g., an antigen loss mutation) or other CD19 alteration that reduces the level of CD19 (e.g., caused by clonal selection of CD19-negative clones). A cancer that harbors such CD19 loss or alteration is referred to herein as a “CD19-negative cancer” or a “CD19-negative relapsed cancer”). It shall be understood that a CD19-negative cancer need not have 100% loss of CD19, but a sufficient reduction to reduce the effectiveness of a CD19 therapy such that the cancer relapses or becomes refractory. In some embodiments, a CD19-negative cancer results from a CD19 CAR therapy.

[0431] The term “specifically binds,” refers to an antibody, or a ligand, which recognizes and binds with a binding partner (e.g., a stimulatory tumor antigen) protein present in a sample, but which antibody or ligand does not substantially recognize or bind other molecules in the sample.

[0432] As used herein, the term “pharmaceutically acceptable salt” refers to those salts which are, within the scope of sound medical judgment, suitable for use in contact with the tissues of subjects without undue toxicity, irritation, allergic response and the like, and are commensurate with a reasonable benefit/risk ratio. Pharmaceutically acceptable salts are well known in the art. For example, Berge et al. describes pharmaceutically acceptable salts in detail in J. Pharmaceutical Sciences (1977) 66:1-19.

[0433] “Regulatable chimeric antigen receptor (RCAR),” as that term is used herein, refers to a set of polypeptides, typically two in the simplest embodiments, which when in a RCARX cell, provides the RCARX cell with specificity for a target cell, typically a cancer cell, and with regulatable intracellular signal generation or proliferation, which can optimize an immune effector property of the RCARX cell. An RCARX cell relies at least in part, on an antigen binding domain to provide specificity to a target cell that comprises the antigen bound by the antigen binding domain. In an embodiment, an RCAR includes a dimerization switch that, upon the presence of a dimerization molecule, can couple an intracellular signaling domain to the antigen binding domain.

[0434] “Membrane anchor” or “membrane tethering domain”, as that term is used herein, refers to a polypeptide or moiety, e.g., a myristoyl group, sufficient to anchor an extracellular or intracellular domain to the plasma membrane.

[0435] “Switch domain,” as that term is used herein, e.g., when referring to an RCAR, refers to an entity, typically a polypeptide-based entity, that, in the presence of a dimerization molecule, associates with another switch domain. The association results in a functional coupling of a first entity linked to, e.g., fused to, a first switch domain, and a second entity linked to, e.g., fused to, a second switch domain. A first and second switch domain are collectively referred to as a dimerization switch. In embodiments, the first and second switch domains are the same as one another, e.g., they are polypeptides having the same primary amino acid sequence, and are referred to collectively as a homodimerization switch. In embodiments, the first and second switch domains are different from one another, e.g., they are polypeptides having different primary amino acid sequences, and are referred to collectively as a heterodimerization switch. In embodiments, the switch is intracellular. In embodiments, the switch is extracellular. In embodiments, the switch domain is a polypeptide-based entity, e.g., FKBP or FRB-based, and the dimerization molecule is small molecule, e.g., a rapalogue. In embodiments, the switch domain is a polypeptide-based entity, e.g., an scFv that binds a myc peptide, and the dimerization molecule is a polypeptide, a fragment thereof, or a multimer of a polypeptide, e.g., a myc ligand or multimers of a myc ligand that bind to one or more myc scFvs. In embodiments, the switch domain is a polypeptide-based entity, e.g., myc receptor, and the dimerization molecule is an antibody or fragments thereof, e.g., myc antibody.

[0436] “Dimerization molecule,” as that term is used herein, e.g., when referring to an RCAR, refers to a molecule that promotes the association of a first switch domain with a second switch domain. In embodiments, the dimerization molecule does not naturally occur in the subject, or does not occur in concentrations that would result in significant dimerization. In embodiments, the dimerization molecule is a small molecule, e.g., rapamycin or a rapalogue, e.g., RAD001.

[0437] The term “low, immune enhancing, dose” when used in conjunction with an mTOR inhibitor, e.g., an allosteric mTOR inhibitor, e.g., RAD001 or rapamycin, or a catalytic mTOR inhibitor, refers to a dose of mTOR inhibitor that partially, but not fully, inhibits mTOR activity, e.g., as measured by the inhibition of P70 S6 kinase activity. Methods for evaluating mTOR activity, e.g., by inhibition of P70 S6 kinase, are discussed herein. The dose is insufficient to result in complete immune suppression but is sufficient to enhance the immune response. In an embodiment, the low, immune enhancing, dose of mTOR inhibitor results in a decrease in the number of PD-1 positive T cells and/or an increase in the number of PD-1 negative T cells, or an increase in the ratio of PD-1 negative T cells/PD-1 positive T cells. In an embodiment, the low, immune enhancing, dose of mTOR inhibitor results in an increase in the number of naive T cells. In an embodiment, the low, immune enhancing, dose of mTOR inhibitor results in one or more of the following:
[0438] an increase in the expression of one or more of the following markers: CD62L^{high}, CD127^{high}, CD27⁺, and BCL2, e.g., on memory T cells, e.g., memory T cell precursors;
[0439] a decrease in the expression of KLRG1, e.g., on memory T cells, e.g., memory T cell precursors; and
[0440] an increase in the number of memory T cell precursors, e.g., cells with any one or combination of the following characteristics: increased CD62L^{high}, increased CD127^{high}, increased CD27⁺, decreased KLRG1, and increased BCL2;
   wherein any of the changes described above occurs, e.g., at least transiently, e.g., as compared to a non-treated subject.

[0441] Ranges: throughout this disclosure, various aspects of the invention can be presented in a range format. It should be understood that the description in range format is merely for convenience and brevity and should not be construed as an inflexible limitation on the scope of the invention. Accordingly, the description of a range should be considered to have specifically disclosed all the possible subranges as well as individual numerical values within that range. For example, description of a range such as from 1 to 6 should be considered to have specifically disclosed subranges such as from 1 to 3, from 1 to 4, from 1 to 5, from 2 to 4, from 2 to 6, from 3 to 6 etc., as well as individual numbers within that range, for example, 1, 2, 2.7, 3, 4, 5, 5.3, and 6. As another example, a range such as 95-99% identity, includes something with 95%, 96%, 97%, 98% or 99% identity, and includes subranges such as 96-99%, 96-98%, 96-97%, 97-99%, 97-98% and 98-99% identity. This applies regardless of the breadth of the range.

### DESCRIPTION

[0442] CD19 Inhibitors and Binding Domains

[0443] Provided herein are compositions of matter and methods of use for the treatment of a disease such as cancer using CD19 chimeric antigen receptors (CAR). The methods include, inter alia, administering a CD19 CAR described herein in combination with another agent such as B-cell inhibitor. The methods also include, e.g., administering a CD19 CAR described herein to treat a lymphoma such as Hodgkin lymphoma.

[0444] In one aspect, the invention provides a number of chimeric antigen receptors (CAR) comprising an antibody or antibody fragment engineered for specific binding to a CD19 protein. In one aspect, the invention provides a cell (e.g., T cell) engineered to express a CAR, wherein the CAR T cell (“CART”) exhibits an anticancer property. In one aspect a cell is transformed with the CAR and the CAR is expressed on the cell surface. In some embodiments, the cell (e.g., T cell) is transduced with a viral vector encoding a CAR. In some embodiments, the viral vector is a retroviral vector. In some embodiments, the viral vector is a lentiviral vector. In some such embodiments, the cell may stably express the CAR. In another embodiment, the cell (e.g., T cell) is transfected with a nucleic acid, e.g., mRNA, cDNA, DNA, encoding a CAR. In some such embodiments, the cell may transiently express the CAR.

[0445] In one aspect, the anti-CD19 protein binding portion of the CAR is a scFv antibody fragment. In one aspect such antibody fragments are functional in that they retain the equivalent binding affinity, e.g., they bind the same antigen with comparable affinity, as the IgG antibody from which it is derived. In one aspect such antibody fragments are functional in that they provide a biological response that can include, but is not limited to, activation of an immune response, inhibition of signal-transduction origination from its target antigen, inhibition of kinase activity, and the like, as will be understood by a skilled artisan. In one aspect, the anti-CD19 antigen binding domain of the CAR is a scFv antibody fragment that is humanized compared to the murine sequence of the scFv from which it is derived. In one aspect, the parental murine scFv sequence is the CAR19 construct provided in PCT publication WO2012/079000 and provided herein as SEQ ID NO:59. In one embodiment, the anti-CD19 binding domain is a scFv described in WO2012/079000 and provided in SEQ ID NO:59, or a sequence at least 95%, e.g., 95-99%, identical thereto. In an embodiment, the anti-CD19 binding domain is part of a CAR construct provided in PCT publication WO2012/079000 and provided herein as SEQ ID NO:58, or a sequence at least 95%, e.g., 95%-99%, identical thereto. In an embodiment, the anti-CD19 binding domain comprises at least one (e.g., 2, 3, 4, 5, or 6) CDRs selected from Table 4 and/or Table 5.

[0446] In some aspects, the antibodies of the invention are incorporated into a chimeric antigen receptor (CAR). In one aspect, the CAR comprises the polypeptide sequence provided as SEQ ID NO: 12 in PCT publication WO2012/079000, and provided herein as SEQ ID NO: 58, wherein the scFv domain is substituted by one or more sequences selected from SEQ ID NOS: 1-12. In one aspect, the scFv domains of SEQ ID NOS:1-12 are humanized variants of the scFv domain of SEQ ID NO:59, which is an scFv fragment of murine origin that specifically binds to human CD19. Humanization of this mouse scFv may be desired for the clinical setting, where the mouse-specific residues may induce a human-anti-mouse antigen (HAMA) response in patients who receive CART19 treatment, e.g., treatment with T cells transduced with the CAR19 construct.

[0447] In one aspect, the anti-CD19 binding domain, e.g., humanized scFv, portion of a CAR of the invention is encoded by a transgene whose sequence has been codon optimized for expression in a mammalian cell. In one aspect, entire CAR construct of the invention is encoded by a transgene whose entire sequence has been codon optimized for expression in a mammalian cell. Codon optimization refers to the discovery that the frequency of occurrence of synonymous codons (i.e., codons that code for the same amino acid) in coding DNA is biased in different species. Such codon degeneracy allows an identical polypeptide to be encoded by a variety of nucleotide sequences. A variety of codon optimization methods is known in the art, and include, e.g., methods disclosed in at least U.S. Pat. Nos. 5,786,464 and 6,114,148.

[0448] In one aspect, the humanized CAR19 comprises the scFv portion provided in SEQ ID NO:1. In one aspect, the humanized CAR19 comprises the scFv portion provided in SEQ ID NO:2. In one aspect, the humanized CAR19 comprises the scFv portion provided in SEQ ID NO:3. In one aspect, the humanized CAR19 comprises the scFv portion provided in SEQ ID NO:4. In one aspect, the humanized CAR19 comprises the scFv portion provided in SEQ ID NO:5. In one aspect, the humanized CAR19 comprises the scFv portion provided in SEQ ID NO:6. In one aspect, the humanized CAR19 comprises the scFv portion provided in SEQ ID NO:7. In one aspect, the humanized CAR19 comprises the scFv portion provided in SEQ ID NO:8. In one aspect, the humanized CAR19 comprises the scFv portion provided in SEQ ID NO:9. In one aspect, the humanized CAR19 comprises the scFv portion provided in SEQ ID NO:10. In one aspect, the humanized CAR19 comprises the scFv portion provided in SEQ ID NO:11. In one aspect, the humanized CAR19 comprises the scFv portion provided in SEQ ID NO:12.

[0449] In one aspect, the CARs of the invention combine an antigen binding domain of a specific antibody with an intracellular signaling molecule. For example, in some aspects, the intracellular signaling molecule includes, but is not limited to, CD3-zeta chain, 4-1BB and CD28 signaling modules and combinations thereof. In one aspect, the CD19 CAR comprises a CAR selected from the sequence provided in one or more of SEQ ID NOS: 31-42. In one aspect, the CD19 CAR comprises the sequence provided in SEQ ID NO:31. In one aspect, the CD19 CAR comprises the sequence provided in SEQ ID NO:32. In one aspect, the CD19 CAR comprises the sequence provided in SEQ ID NO:33. In one aspect, the CD19 CAR comprises the sequence provided in SEQ ID NO:34. In one aspect, the CD19 CAR comprises the sequence provided in SEQ ID NO:35. In one aspect, the CD19 CAR comprises the sequence provided in SEQ ID NO:36. In one aspect, the CD19 CAR comprises the sequence provided in SEQ ID NO:37. In one aspect, the CD19 CAR comprises the sequence provided in SEQ ID NO:38. In one aspect, the CD19 CAR comprises the sequence provided in SEQ ID NO:39. In one aspect, the CD19 CAR comprises the sequence provided in SEQ ID NO:40. In one aspect, the CD19 CAR comprises the sequence provided in SEQ ID NO:41. In one aspect, the CD19 CAR comprises the sequence provided in SEQ ID NO:42.

[0450] Thus, in one aspect, the antigen binding domain comprises a humanized antibody or an antibody fragment. In one embodiment, the humanized anti-CD19 binding domain comprises one or more (e.g., all three) light chain complementarity determining region 1 (LC CDR1), light chain complementarity determining region 2 (LC CDR2), and light chain complementarity determining region 3 (LC CDR3) of a murine or humanized anti-CD19 binding domain described herein, and/or one or more (e.g., all three) heavy chain complementarity determining region 1 (HC CDR1), heavy chain complementarity determining region 2 (HC CDR2), and heavy chain complementarity determining region 3 (HC CDR3) of a murine or humanized anti-CD19 binding domain described herein, e.g., a humanized anti-CD19 binding domain comprising one or more, e.g., all three, LC CDRs and one or more, e.g., all three, HC CDRs. In one embodiment, the humanized anti-CD19 binding domain comprises one or more (e.g., all three) heavy chain complementarity determining region 1 (HC CDR1), heavy chain complementarity determining region 2 (HC CDR2), and heavy chain complementarity determining region 3 (HC CDR3) of a murine or humanized anti-CD19 binding domain described herein, e.g., the humanized anti-CD19 binding domain has two variable heavy chain regions, each comprising a HC CDR1, a HC CDR2 and a HC CDR3 described herein. In one embodiment, the humanized anti-CD19 binding domain comprises a humanized light chain variable region described herein (e.g., in Table 2) and/or a humanized heavy chain variable region described herein (e.g., in Table 2). In one embodiment, the humanized anti-CD19 binding domain comprises a humanized heavy chain variable region described herein (e.g., in Table 2), e.g., at least two humanized heavy chain variable regions described herein (e.g., in Table 2). In one embodiment, the anti-CD19 binding domain is a scFv comprising a light chain and a heavy chain of an amino acid sequence of Table 2. In an embodiment, the anti-CD19 binding domain (e.g., an scFv) comprises: a light chain variable region comprising an amino acid sequence having at least one, two or three modifications (e.g., substitutions) but not more than 30, 20 or 10 modifications (e.g., substitutions) of an amino acid sequence of a light chain variable region provided in Table 2, or a sequence with 95-99% identity with an amino acid sequence of Table 2; and/or a heavy chain variable region comprising an amino acid sequence having at least one, two or three modifications (e.g., substitutions) but not more than 30, 20 or 10 modifications (e.g., substitutions) of an amino acid sequence of a heavy chain variable region provided in Table 2, or a sequence with 95-99% identity to an amino acid sequence of Table 2. In one embodiment, the humanized anti-CD19 binding domain comprises a sequence selected from a group consisting of SEQ ID NO:1, SEQ ID NO:2, SEQ ID NO:3, SEQ ID NO:4, SEQ ID NO:5, SEQ ID NO:6, SEQ ID NO:7, SEQ ID NO:8, SEQ ID NO:9, SEQ ID NO:10, SEQ ID NO:11, and SEQ ID NO:12, or a sequence with 95-99% identity thereof. In one embodiment, the nucleic acid sequence encoding the humanized anti-CD19 binding domain comprises a sequence selected from a group consisting of SEQ ID NO:61, SEQ ID NO:62, SEQ ID NO:63, SEQ ID NO:64, SEQ ID NO:65, SEQ ID NO:66, SEQ ID NO:67, SEQ ID NO:68, SEQ ID NO:70, SEQ ID NO:71 and SEQ ID NO:72, or a sequence with 95-99% identity thereof. In one embodiment, the humanized anti-CD19 binding domain is a scFv, and a light chain variable region comprising an amino acid sequence described herein, e.g., in Table 2, is attached to a heavy chain variable region comprising an amino acid sequence described herein, e.g., in Table 2, via a linker, e.g., a linker described herein. In one embodiment, the humanized anti-CD19 binding domain includes a (Gly₄-Ser)n linker, wherein n is 1, 2, 3, 4, 5, or 6, e.g., 3 or 4 (SEQ ID NO:53). The light chain variable region and heavy chain variable region of a scFv can be, e.g., in any of the following orientations: light chain variable region-linker-heavy chain variable region or heavy chain variable region-linker-light chain variable region.

[0451] In one aspect, the antigen binding domain portion comprises one or more sequence selected from SEQ ID NOS:1-12. In one aspect the humanized CAR is selected from one or more sequence selected from SEQ ID NOS: 31-42. In some aspects, a non-human antibody is humanized, where specific sequences or regions of the antibody are modified to increase similarity to an antibody naturally produced in a human or fragment thereof.

[0452] In one embodiment, the CAR molecule comprises an anti-CD19 binding domain comprising one or more (e.g., all three) light chain complementarity determining region 1 (LC CDR1), light chain complementarity determining region 2 (LC CDR2), and light chain complementarity determining region 3 (LC CDR3) of an anti-CD19 binding domain described herein, and one or more (e.g., all three) heavy chain complementarity determining region 1 (HC CDR1), heavy chain complementarity determining region 2 (HC CDR2), and heavy chain complementarity determining region 3 (HC CDR3) of an anti-CD19 binding domain described herein, e.g., an anti-CD19 binding domain comprising one or more, e.g., all three, LC CDRs and one or more, e.g., all three, HC CDRs. In one embodiment, the anti-CD19 binding domain comprises one or more (e.g., all three) heavy chain complementarity determining region 1 (HC CDR1), heavy chain complementarity determining region 2 (HC CDR2), and heavy chain complementarity determining region 3 (HC CDR3) of an anti-CD19 binding domain described herein, e.g., the anti-CD19 binding domain has two variable heavy chain regions, each comprising a HC CDR1, a HC CDR2 and a HC CDR3 described herein.

[0453] In one aspect, the anti-CD19 binding domain is characterized by particular functional features or properties of an antibody or antibody fragment. For example, in one aspect, the portion of a CAR composition of the invention that comprises an antigen binding domain specifically binds human CD19. In one aspect, the invention relates to an antigen binding domain comprising an antibody or antibody fragment, wherein the antibody binding domain specifically binds to a CD19 protein or fragment thereof, wherein the antibody or antibody fragment comprises a variable light chain and/or a variable heavy chain that includes an amino acid sequence of SEQ ID NO: 1-12 or SEQ ID NO:59. In one aspect, the antigen binding domain comprises an amino acid sequence of an scFv selected from SEQ ID NOs: 1-12 or SEQ ID NO:59. In certain aspects, the scFv is contiguous with and in the same reading frame as a leader sequence. In one aspect the leader sequence is the polypeptide sequence provided as SEQ ID NO:13.

[0454] In one aspect, the portion of the CAR comprising the antigen binding domain comprises an antigen binding domain that targets CD19. In one aspect, the antigen binding domain targets human CD19. In one aspect, the antigen binding domain of the CAR has the same or a similar binding specificity as, or includes, the FMC63 scFv fragment described in Nicholson et al. Mol. Immun. 34 (16-17): 1157-1165 (1997). In one aspect, the portion of the CAR comprising the antigen binding domain comprises an antigen binding domain that targets a B-cell antigen, e.g., a human B-cell antigen. A CD19 antibody molecule can be, e.g., an antibody molecule (e.g., a humanized anti-CD19 antibody molecule) described in WO2014/153270, which is incorporated herein by reference in its entirety. WO2014/153270 also describes methods of assaying the binding and efficacy of various CART constructs.

[0455] In one embodiment, the anti-CD19 binding domain comprises a murine light chain variable region described herein (e.g., in Table 3) and/or a murine heavy chain variable region described herein (e.g., in Table 3). In one embodiment, the anti-CD19 binding domain is a scFv comprising a murine light chain and a murine heavy chain of an amino acid sequence of Table 3. In an embodiment, the anti-CD19 binding domain (e.g., an scFv) comprises: a light chain variable region comprising an amino acid sequence having at least one, two or three modifications (e.g., substitutions) but not more than 30, 20 or 10 modifications (e.g., substitutions) of an amino acid sequence of a light chain variable region provided in Table 3, or a sequence with 95-99% identity with an amino acid sequence of Table 3; and/or a heavy chain variable region comprising an amino acid sequence having at least one, two or three modifications (e.g., substitutions) but not more than 30, 20 or 10 modifications (e.g., substitutions) of an amino acid sequence of a heavy chain variable region provided in Table 3, or a sequence with 95-99% identity to an amino acid sequence of Table 3. In one embodiment, the anti-CD19 binding domain comprises a sequence of SEQ ID NO:59, or a sequence with 95-99% identity thereof. In one embodiment, the anti-CD19 binding domain is a scFv, and a light chain variable region comprising an amino acid sequence described herein, e.g., in Table 3, is attached to a heavy chain variable region comprising an amino acid sequence described herein, e.g., in Table 3, via a linker, e.g., a linker described herein. In one embodiment, the antigen binding domain includes a (Gly₄-Ser)n linker, wherein n is 1, 2, 3, 4, 5, or 6, e.g., 3 or 4 (SEQ ID NO: 53). The light chain variable region and heavy chain variable region of a scFv can be, e.g., in any of the following orientations: light chain variable region-linker-heavy chain variable region or heavy chain variable region-linker-light chain variable region.

[0456] Furthermore, the present invention provides (among other things) CD19 CAR compositions, optionally in combination with a B-cell inhibitor, and their use in medicaments or methods for treating, among other diseases, cancer or any malignancy or autoimmune diseases involving cells or tissues which express CD19.

[0457] In one aspect, the CAR of the invention can be used to eradicate CD19-expressing normal cells, thereby applicable for use as a cellular conditioning therapy prior to cell transplantation. In one aspect, the CD19-expressing normal cell is a CD19-expressing normal stem cell and the cell transplantation is a stem cell transplantation.

[0458] In one aspect, the invention provides a cell (e.g., T cell) engineered to express a chimeric antigen receptor (CAR), wherein the CAR-expressing cell, e.g., CAR T cell (“CART”) exhibits an anticancer property. A suitable antigen is CD19. In one aspect, the antigen binding domain of the CAR comprises a partially humanized anti-CD19 antibody fragment. In one aspect, the antigen binding domain of the CAR comprises a partially humanized anti-CD19 antibody fragment comprising an scFv. Accordingly, the invention provides (among other things) a CD19-CAR that comprises a humanized anti-CD19 binding domain and is engineered into an immune effector cell, e.g., a T cell or an NK cell, and methods of their use for adoptive therapy.

[0459] In one aspect, the CAR, e.g., CD19-CAR comprises at least one intracellular domain selected from the group of a CD137 (4-1BB) signaling domain, a CD28 signaling domain, a CD3zeta signal domain, and any combination thereof. In one aspect, the CAR, e.g., CD19-CAR comprises at least one intracellular signaling domain is from one or more co-stimulatory molecule(s) other than a CD137 (4-1BB) or CD28.

[0460] The present invention encompasses, but is not limited to, a recombinant DNA construct comprising sequences encoding a CAR, wherein the CAR comprises an antibody or antibody fragment that binds specifically to CD19, CD10, CD20, CD22, CD34, CD123, FLT-3, or ROR1, e.g., human CD19, CD10, CD20, CD22, CD34, CD123, FLT-3, or ROR1, wherein the sequence of the antibody fragment is contiguous with and in the same reading frame as a nucleic acid sequence encoding an intracellular signaling domain. The intracellular signaling domain can comprise a costimulatory signaling domain and/or a primary signaling domain, e.g., a zeta chain. The costimulatory signaling domain refers to a portion of the CAR comprising at least a portion of the intracellular domain of a costimulatory molecule. In one embodiment, the antigen binding domain is a murine antibody or antibody fragment described herein. In one embodiment, the antigen binding domain is a humanized antibody or antibody fragment.

[0461] In specific aspects, a CAR construct of the invention comprises a scFv domain selected from the group consisting of SEQ ID NOS:1-12 or an scFV domain of SEQ ID NO:59, wherein the scFv may be preceded by an optional leader sequence such as provided in SEQ ID NO: 13, and followed by an optional hinge sequence such as provided in SEQ ID NO:14 or SEQ ID NO:45 or SEQ ID NO:47 or SEQ ID NO:49, a transmembrane region such as provided in SEQ ID NO:15, an intracellular signalling domain that includes SEQ ID NO:16 or SEQ ID NO:51 and a CD3 zeta sequence that includes SEQ ID NO:17 or SEQ ID NO:43, wherein the domains are contiguous with and in the same reading frame to form a single fusion protein. Also included in the invention (among other things) is a nucleotide sequence that encodes the polypeptide of each of the scFv fragments selected from the group consisting of SEQ IS NO:1, SEQ ID NO:2, SEQ ID NO:3, SEQ ID NO:4, SEQ ID NO:5, SEQ IS NO:6, SEQ ID NO:7, SEQ ID NO:8, SEQ ID NO:9, SEQ ID NO:10, SEQ ID NO:11, SEQ ID NO:12 and SEQ ID NO:59. Also included in the invention (among other things) is a nucleotide sequence that encodes the polypeptide of each of the scFv fragments selected from the group consisting of SEQ IS NO:1, SEQ ID NO:2, SEQ ID NO:3, SEQ ID NO:4, SEQ ID NO:5, SEQ IS NO:6, SEQ ID NO:7, SEQ ID NO:8, SEQ ID NO:9, SEQ ID NO:10, SEQ ID NO:11, SEQ ID NO:12 and SEQ ID NO:59, and each of the domains of SEQ ID NOS: 13-17, plus an encoded CD19 CAR fusion protein of the invention. In one aspect an exemplary CD19 CAR constructs comprise an optional leader sequence, an extracellular antigen binding domain, a hinge, a transmembrane domain, and an intracellular stimulatory domain. In one aspect an exemplary CD19 CAR construct comprises an optional leader sequence, an extracellular antigen binding domain, a hinge, a transmembrane domain, an intracellular costimulatory domain and an intracellular stimulatory domain. In some embodiments, specific CD19 CAR constructs containing humanized scFv domains of the invention are provided as SEQ ID NOS: 31-42, or a murine scFv domain as provided as SEQ ID NO:59.

[0462] Full-length CAR sequences are also provided herein as SEQ ID NOS: 31-42 and 58, as shown in Table 2 and Table 3.

[0463] An exemplary leader sequence is provided as SEQ ID NO: 13. An exemplary hinge/spacer sequence is provided as SEQ ID NO: 14 or SEQ ID NO:45 or SEQ ID NO:47 or SEQ ID NO:49. An exemplary transmembrane domain sequence is provided as SEQ ID NO:15. An exemplary sequence of the intracellular signaling domain of the 4-1BB protein is provided as SEQ ID NO: 16. An exemplary sequence of the intracellular signaling domain of CD27 is provided as SEQ ID NO:51. An exemplary CD3zeta domain sequence is provided as SEQ ID NO: 17 or SEQ ID NO:43. These sequences may be used, e.g., in combination with an scFv that recognizes one or more of CD19, CD10, CD20, CD22, CD34, CD123, FLT-3, or ROR1.

[0464] Exemplary sequences of various scFv fragments and other CAR components are provided herein. It is noted that these CAR components (e.g., of SEQ ID NO: 121, or a sequence of Table 2, 3, 6, 11A, 11B, 16, or 25) without a leader sequence (e.g., without the amino acid sequence of SEQ ID NO: 13 or a nucleotide sequence of SEQ ID NO: 54), are also provided herein.

[0465] In embodiments, the CAR sequences described herein contain a Q/K residue change in the signal domain of the co-stimulatory domain derived from CD3zeta chain.

[0466] In one aspect, the present invention encompasses a recombinant nucleic acid construct comprising a nucleic acid molecule encoding a CAR, wherein the nucleic acid molecule comprises the nucleic acid sequence encoding an anti-CD19 binding domain, e.g., described herein, that is contiguous with and in the same reading frame as a nucleic acid sequence encoding an intracellular signaling domain. In one aspect, the anti-CD19 binding domain is selected from one or more of SEQ ID NOS:1-12 and 58. In one aspect, the anti-CD19 binding domain is encoded by a nucleotide residues 64 to 813 of the sequence provided in one or more of SEQ ID NOS:61-72 and 97. In one aspect, the anti-CD19 binding domain is encoded by a nucleotide residues 64 to 813 of SEQ ID NO:61. In one aspect, the anti-CD19 binding domain is encoded by a nucleotide residues 64 to 813 of SEQ ID NO:62. In one aspect, the anti-CD19 binding domain is encoded by a nucleotide residues 64 to 813 of SEQ ID NO:63. In one aspect, the anti-CD19 binding domain is encoded by a nucleotide residues 64 to 813 of SEQ ID NO:64. In one aspect, the anti-CD19 binding domain is encoded by a nucleotide residues 64 to 813 of SEQ ID NO:65. In one aspect, the anti-CD19 binding domain is encoded by a nucleotide residues 64 to 813 of SEQ ID NO:66. In one aspect, the anti-CD19 binding domain is encoded by a nucleotide residues 64 to 813 of SEQ ID NO:67. In one aspect, the anti-CD19 binding domain is encoded by a nucleotide residues 64 to 813 of SEQ ID NO:68. In one aspect, the anti-CD19 binding domain is encoded by a nucleotide residues 64 to 813 of SEQ ID NO:69. In one aspect, the anti-CD19 binding domain is encoded by a nucleotide residues 64 to 813 of SEQ ID NO:70. In one aspect, the anti-CD19 binding domain is encoded by a nucleotide residues 64 to 813 of SEQ ID NO:71. In one aspect, the anti-CD19 binding domain is encoded by a nucleotide residues 64 to 813 of SEQ ID NO:72.

[0467] Provided herein are CD19 inhibitors and combination therapies. In some embodiments, the CD19 inhibitor (e.g., a cell therapy or an antibody) is administered in combination with a B cell inhibitor, e.g., one or more inhibitors of CD10, CD19, CD20, CD22, CD34, CD123, FLT-3, or ROR1. A CD19 inhibitor includes but is not limited to a CD19 CAR-expressing cell, e.g., a CD19 CART cell, or an anti-CD19 antibody (e.g., an anti-CD19 mono- or bispecific antibody) or a fragment or conjugate thereof. In an embodiment, the CD19 inhibitor is administered in combination with a B-cell inhibitor, e.g., a CAR-expressing cell described herein.

[0468] Numerous CD19 CAR-expressing cells are described in this disclosure. For instance, in some embodiments, a CD19 inhibitor includes an anti-CD19 CAR-expressing cell, e.g., CART, e.g., a cell expressing an anti-CD19 CAR construct described in Table 2 or encoded by a CD19 binding CAR comprising a scFv, CDRs, or VH and VL chains described in Tables 2, 4, or 5. For example, an anti-CD19 CAR-expressing cell, e.g., CART, is a generated by engineering a CD19-CAR (that comprises a CD19 binding domain) into a cell (e.g., a T cell or NK cell), e.g., for administration in combination with a CAR-expressing cell described herein. Also provided herein are methods of use of the CAR-expressing cells described herein for adoptive therapy.

[0469] In one embodiment, an antigen binding domain comprises one, two three (e.g., all three) heavy chain CDRs, HC CDR1, HC CDR2 and HC CDR3, from an antibody listed herein, e.g., in Table 2, 4, or 5 and/or one, two, three (e.g., all three) light chain CDRs, LC CDR1, LC CDR2 and LC CDR3, from an antibody listed herein, e.g., in Table 2, 4, or 5. In one embodiment, the antigen binding domain comprises a heavy chain variable region and/or a variable light chain region of an antibody listed or described above.

[0470] In an embodiment, the CD19 binding domain (e.g., an scFv) comprises: a light chain variable region comprising an amino acid sequence having at least one, two or three modifications (e.g., substitutions) but not more than 30, 20 or 10 modifications (e.g., substitutions) of an amino acid sequence of a light chain variable region provided in Table 2, or a sequence with 95-99% identity with an amino acid sequence of Table 2; and/or a heavy chain variable region comprising an amino acid sequence having at least one, two or three modifications (e.g., substitutions) but not more than 30, 20 or 10 modifications (e.g., substitutions) of an amino acid sequence of a heavy chain variable region provided in Table 2, or a sequence with 95-99% identity to an amino acid sequence of Table 2. In embodiments, the CD19 binding domain comprises one or more CDRs (e.g., one each of a HC CDR1, HC CDR2, HC CDR3, LC CDR1, LC CDR2, and LC CDR3) of Table 4 or Table 5, or CDRs having one, two, three, four, five, or six modifications (e.g., substitutions) of one or more of the CDRs.

[0471] Exemplary anti-CD19 antibodies or fragments or conjugates thereof include but are not limited to blinatumomab, SAR3419 (Sanofi), MEDI-551 (MedImmune LLC), Combotox, DT2219ARL (Masonic Cancer Center), MOR-208 (also called XmAb-5574; MorphoSys), XmAb-5871 (Xencor), MDX-1342 (Bristol-Myers Squibb), SGN-CD19A (Seattle Genetics), and AFM11 (Affimed Therapeutics). See, e.g., Hammer. MAbs. 4.5(2012): 571-77. Blinatomomab is a bispecific antibody comprised of two scFvs—one that binds to CD19 and one that binds to CD3. Blinatomomab directs T cells to attack cancer cells. See, e.g., Hammer et al.; Clinical Trial Identifier No. NCT00274742 and NCT01209286. MEDI-551 is a humanized anti-CD19 antibody with a Fc engineered to have enhanced antibody-dependent cell-mediated cytotoxicity (ADCC). See, e.g., Hammer et al.; and Clinical Trial Identifier No. NCT01957579. Combotox is a mixture of immunotoxins that bind to CD19 and CD22. The immunotoxins are made up of scFv antibody fragments fused to a deglycosylated ricin A chain. See, e.g., Hammer et al.; and Herrera et al. J. Pediatr. Hematol. Oncol. 31.12(2009):936-41; Schindler et al. Br. J. Haematol. 154.4(2011):471-6. DT2219ARL is a bispecific immunotoxin targeting CD19 and CD22, comprising two scFvs and a truncated diphtheria toxin. See, e.g., Hammer et al.; and Clinical Trial Identifier No. NCT00889408. SGN-CD19A is an antibody-drug conjugate (ADC) comprised of an anti-CD19 humanized monoclonal antibody linked to a synthetic cytotoxic cell-killing agent, monomethyl auristatin F (MMAF). See, e.g., Hammer et al.; and Clinical Trial Identifier Nos. NCT01786096 and NCT01786135. SAR3419 is an anti-CD19 antibody-drug conjugate (ADC) comprising an anti-CD19 humanized monoclonal antibody conjugated to a maytansine derivative via a cleavable linker. See, e.g., Younes et al. J. Clin. Oncol. 30.2(201:2): 2776-82; Hammer et al.; Clinical Trial Identifier No. NCT00549185; and Blanc et al. Clin Cancer Res. 2011; 17:6448-58. XmAb-5871 is an Fc-engineered, humanized anti-CD19 antibody. See, e.g., Hammer et al. MDX-1342 is a human Fc-engineered anti-CD19 antibody with enhanced ADCC. See, e.g., Hammer et al. In embodiments, the antibody molecule is a bispecific anti-CD19 and anti-CD3 molecule. For instance, AFM11 is a bispecific antibody that targets CD19 and CD3. See, e.g., Hammer et al.; and Clinical Trial Identifier No. NCT02106091. In some embodiments, an anti-CD19 antibody described herein is conjugated or otherwise bound to a therapeutic agent, e.g., a chemotherapeutic agent, peptide vaccine (such as that described in Izumoto et al. 2008 J Neurosurg 108:963-971), immunosuppressive agent, or immunoablative agent, e.g., cyclosporin, azathioprine, methotrexate, mycophenolate, FK506, CAMPATH, anti-CD3 antibody, cytoxin, fludarabine, rapamycin, mycophenolic acid, steroid, FR901228, or cytokine.

[0472] Exemplary anti-CD19 antibody molecules (including antibodies or fragments or conjugates thereof) can include a scFv, CDRs, or VH and VL chains described in Tables 2, 4, or 5. In an embodiment, the CD19-binding antibody molecule comprises: a light chain variable region comprising an amino acid sequence having at least one, two or three modifications (e.g., substitutions) but not more than 30, 20 or 10 modifications (e.g., substitutions) of an amino acid sequence of a light chain variable region provided in Table 2, or a sequence with 95-99% identity with an amino acid sequence of Table 2; and/or a heavy chain variable region comprising an amino acid sequence having at least one, two or three modifications (e.g., substitutions) but not more than 30, 20 or 10 modifications (e.g., substitutions) of an amino acid sequence of a heavy chain variable region provided in Table 2, or a sequence with 95-99% identity to an amino acid sequence of Table 2. In embodiments, the CD19-binding antibody molecule comprises one or more CDRs (e.g., one each of a HC CDR1, HC CDR2, HC CDR3, LC CDR1, LC CDR2, and LC CDR3) of Table 4 or Table 5, or CDRs having one, two, three, four, five, or six modifications (e.g., substitutions) of one or more of the CDRs. The antibody molecule may be, e.g., an isolated antibody molecule.

[0473] In one embodiment, an antigen binding domain against CD19 is an antigen binding portion, e.g., CDRs, of an antigen binding domain described in a Table herein. In one embodiment, a CD19 antigen binding domain can be from any CD19 CAR, e.g., LG-740; U.S. Pat. Nos. 8,399,645; 7,446,190; Xu et al., Leuk Lymphoma. 2013 54(2):255-260(2012); Cruz et al., Blood 122(17):2965-2973 (2013); Brentjens et al., Blood, 118(18):4817-4828 (2011); Kochenderfer et al., Blood 116(20):4099-102 (2010); Kochenderfer et al., Blood 122 (25):4129-39(2013); and 16th Annu Meet Am Soc Gen Cell Ther (ASGCT) (May 15-18, Salt Lake City) 2013, Abst 10, each of which is herein incorporated by reference in its entirety.

[0474] In one embodiment, the CAR T cell that specifically binds to CD19 has the USAN designation TISAGENLECLEUCEL-T. CTL019 is made by a gene modification of T cells is mediated by stable insertion via transduction with a self-inactivating, replication deficient Lentiviral (LV) vector containing the CTL019 transgene under the control of the EF-1 alpha promoter. CTL019 can be a mixture of transgene positive and negative T cells that are delivered to the subject on the basis of percent transgene positive T cells.

[0475] In one aspect the nucleic acid sequence of a CAR construct of the invention is selected from one or more of SEQ ID NOS:85-96. In one aspect the nucleic acid sequence of a CAR construct is SEQ ID NO:85. In one aspect the nucleic acid sequence of a CAR construct is SEQ ID NO:86. In one aspect the nucleic acid sequence of a CAR construct is SEQ ID NO:87. In one aspect the nucleic acid sequence of a CAR construct is SEQ ID NO:88. In one aspect the nucleic acid sequence of a CAR construct is SEQ ID NO:89. In one aspect the nucleic acid sequence of a CAR construct is SEQ ID NO:90. In one aspect the nucleic acid sequence of a CAR construct is SEQ ID NO:91. In one aspect the nucleic acid sequence of a CAR construct is SEQ ID NO:92. In one aspect the nucleic acid sequence of a CAR construct is SEQ ID NO:93. In one aspect the nucleic acid sequence of a CAR construct is SEQ ID NO:94. In one aspect the nucleic acid sequence of a CAR construct is SEQ ID NO:95. In one aspect the nucleic acid sequence of a CAR construct is SEQ ID NO:96. In one aspect the nucleic acid sequence of a CAR construct is SEQ ID NO:97. In one aspect the nucleic acid sequence of a CAR construct is SEQ ID NO:98. In one aspect the nucleic acid sequence of a CAR construct is SEQ ID NO:99.

[0476] CD20 Inhibitors and Binding Domains

[0477] As used herein, the term “CD20” refers to an antigenic determinant known to be detectable on B cells. Human CD20 is also called membrane-spanning 4-domains, subfamily A, member 1 (MS4A1). The human and murine amino acid and nucleic acid sequences can be found in a public database, such as GenBank, UniProt and Swiss-Prot. For example, the amino acid sequence of human CD20 can be found at Accession Nos. NP_690605.1 and NP_068769.2, and the nucleotide sequence encoding transcript variants 1 and 3 of the human CD20 can be found at Accession No. NM_152866.2 and NM_021950.3, respectively. As used herein, “CD20” includes proteins comprising mutations, e.g., point mutations, fragments, insertions, deletions and splice variants of full length wild-type CD20. In one aspect the antigen-binding portion of the CAR recognizes and binds an antigen within the extracellular domain of the CD20 protein. In one aspect, the CD20 protein is expressed on a cancer cell.

[0478] In some aspects, the present disclosure provides a CD20 inhibitor or binding domain, e.g., a CD20 inhibitor or binding domain as described herein. The disclosure also provides a nucleic acid encoding the CD20 binding domain, or a CAR comprising the CD20 binding domain. A CD20 inhibitor includes but is not limited to a CD20 CAR-expressing cell, e.g., a CD20 CART cell or an anti-CD20 antibody (e.g., an anti-CD20 mono- or bispecific antibody) or a fragment thereof. The composition may also comprise a second agent, e.g., an anti-CD19 CAR-expressing cell or a CD19 binding domain. The agents may be, e.g., encoded by a single nucleic acid or different nucleic acids.

[0479] In some aspects, a CD20 inhibitor or binding domain is administered as a monotherapy. In some aspects, the CD20 inhibitor or binding domain is administered in combination with a second agent such as an anti-CD19 CAR-expressing cell. In an embodiment, the CD20 inhibitor is administered in combination with a CD19 inhibitor, e.g., a CD19 CAR-expressing cell, e.g., a CAR-expressing cell described herein e.g., a cell expressing a CAR comprising an antibody binding domain that is murine, human, or humanized.

[0480] CD20 CAR-Expressing Cells, e.g., CARTs

[0481] In an embodiment, the CD20 antibody molecule comprises: a light chain variable region comprising an amino acid sequence having at least one, two or three modifications (e.g., substitutions) but not more than 30, 20 or 10 modifications (e.g., substitutions) of an amino acid sequence of a light chain variable region provided in Table 15A or 15B, or a sequence with 95-99% identity with an amino acid sequence of Table 15A or 15B; and/or a heavy chain variable region comprising an amino acid sequence having at least one, two or three modifications (e.g., substitutions) but not more than 30, 20 or 10 modifications (e.g., substitutions) of an amino acid sequence of a heavy chain variable region provided in Table 14A or 14B, or a sequence with 95-99% identity to an amino acid sequence of Table 14A or 14B. In one embodiment, the CD20 antibody molecule comprises one or more (e.g., two or all three) light chain complementarity determining region 1 (LC CDR1), light chain complementarity determining region 2 (LC CDR2), and light chain complementarity determining region 3 (LC CDR3) of a CD20 binding domain described herein, and/or one or more (e.g., all three) heavy chain complementarity determining region 1 (HC CDR1), heavy chain complementarity determining region 2 (HC CDR2), and heavy chain complementarity determining region 3 (HC CDR3) of a CD20 binding domain described herein, e.g., a CD20 binding domain comprising one or more, e.g., all three, LC CDRs and one or more, e.g., all three, HC CDRs. These CDRs may be, e.g., those of Table 12A, 12B, and/or Table 13, or a sequence substantially identical thereto. In an embodiment, the CD20 antibody molecule comprises one or more CDRs (e.g., a HC CDR1, HC CDR2, HC CDR3, LC CDR1, LC CDR2, or LC CDR3) comprising an amino acid sequence having one, two, three, four, five, or six modifications (e.g., substitutions) of an amino acid sequence of Table 12A, 12B, and/or Table 13. The antibody molecule may be, e.g., an isolated antibody molecule.

[0482] In some embodiments, a CD20 inhibitor includes an anti-CD20 CAR-expressing cell, e.g., CART, e.g., a cell expressing an anti-CD20 CAR construct described in Table 11A or 11B, or a sequence substantially identical thereto, or encoded by a CD20 binding CAR comprising a scFv, CDRs, or VH and VL chains described in Tables 11A-15B, or a sequence substantially identical thereto. For example, an anti-CD20 CAR-expressing cell, e.g., CART, is a generated by engineering a CD20-CAR (that comprises a CD20 binding domain) into a cell (e.g., a T cell or NK cell), e.g., for administration in combination with a CAR-expressing cell described herein. Also provided herein are methods of use of the CAR-expressing cells described herein for adoptive therapy.

[0483] In an embodiment, the CD20 binding domain (e.g., an scFv) comprises: a light chain variable region comprising an amino acid sequence having at least one, two or three modifications (e.g., substitutions) but not more than 30, 20 or 10 modifications (e.g., substitutions) of an amino acid sequence of a light chain variable region provided in Table 15A or 15B, or a sequence with 95-99% identity with an amino acid sequence of Table 15A or 15B; and/or a heavy chain variable region comprising an amino acid sequence having at least one, two or three modifications (e.g., substitutions) but not more than 30, 20 or 10 modifications (e.g., substitutions) of an amino acid sequence of a heavy chain variable region provided in Table 14A or 14B, or a sequence with 95-99% identity to an amino acid sequence of Table 14A or 14B.

[0484] In one embodiment, the CD20 binding domain comprises one or more (e.g., two or all three) light chain complementarity determining region 1 (LC CDR1), light chain complementarity determining region 2 (LC CDR2), and light chain complementarity determining region 3 (LC CDR3) of a CD20 binding domain described herein, and/or one or more (e.g., all three) heavy chain complementarity determining region 1 (HC CDR1), heavy chain complementarity determining region 2 (HC CDR2), and heavy chain complementarity determining region 3 (HC CDR3) of a CD20 binding domain described herein, e.g., a CD20 binding domain comprising one or more, e.g., all three, LC CDRs and one or more, e.g., all three, HC CDRs. These CDRs may be, e.g., those of Table 12A, 12B, and/or Table 13, or a sequence substantially identical thereto. In an embodiment, the CD20 binding domain (e.g., an scFv) comprises one or more CDRs (e.g., a HC CDR1, HC CDR2, HC CDR3, LC CDR1, LC CDR2, or LC CDR3) comprising an amino acid sequence having one, two, three, four, five, or six modifications (e.g., substitutions) of an amino acid sequence of Table 12A, 12B, and/or Table 13.

[0485] In some embodiments, the CAR comprises an antibody or antibody fragment which includes a CD20 binding domain, a transmembrane domain, and an intracellular signaling domain. The CD20 binding domain may comprise one or more of light chain complementarity determining region 1 (LC CDR1), light chain complementarity determining region 2 (LC CDR2), and light chain complementarity determining region 3 (LC CDR3) of any CD20 light chain binding domain amino acid sequence listed in Table 13, 15A, or 15B, and one or more of heavy chain complementarity determining region 1 (HC CDR1), heavy chain complementarity determining region 2 (HC CDR2), and heavy chain complementarity determining region 3 (HC CDR3) of any CD20 heavy chain binding domain amino acid sequence listed in Table 12A, 12B, 14A, or 14B.

[0486] In an embodiment, the CD20 binding domain comprises six CDRs (e.g., one each of a HC CDR1, HC CDR2, HC CDR3, LC CDR1, LC CDR2, and LC CDR3) of any one of CAR20-1, CAR20-2, CAR20-3, CAR20-4, CAR20-5, CAR20-6, CAR20-7, CAR20-8, CAR20-9, CAR20-10, CAR20-11, CAR20-12, CAR20-13, CAR20-14, CAR20-15, or CAR20-16, or a sequence substantially identical thereto. In an embodiment, the CD20 binding domain comprises three CDRs (e.g., one each of a HC CDR1, HC CDR2, and HC CDR3, or one each of a LC CDR1, LC CDR2, and LC CDR3) of any one of CAR20-1, CAR20-2, CAR20-3, CAR20-4, CAR20-5, CAR20-6, CAR20-7, CAR20-8, CAR20-9, CAR20-10, CAR20-11, CAR20-12, CAR20-13, CAR20-14, CAR20-15, or CAR20-16, or a sequence substantially identical thereto.

[0487] In one embodiment, the CD20 binding domain comprises a light chain variable region described herein (e.g., in Table 15A or 15B) and/or a heavy chain variable region described herein (e.g., in Table 14A or 14B), or a sequence substantially identical thereto. In an embodiment, the CD20 binding domain (e.g., an scFv) comprises: a light chain variable region comprising an amino acid sequence having at least one, two or three modifications (e.g., substitutions) but not more than 30, 20 or 10 modifications (e.g., substitutions) of an amino acid sequence of a light chain variable region provided in Table 15A or 15B, or a sequence with 95-99% identity with an amino acid sequence of Table 15A or 15B; and/or a heavy chain variable region comprising an amino acid sequence having at least one, two or three modifications (e.g., substitutions) but not more than 30, 20 or 10 modifications (e.g., substitutions) of an amino acid sequence of a heavy chain variable region provided in Table 14A or 14B, or a sequence with 95-99% identity to an amino acid sequence of Table 14A or 14B.

[0488] Further embodiments include a nucleotide sequence that encodes a polypeptide described in this section. For example, further embodiments include a nucleotide sequence that encodes a polypeptide of any of Tables 11A-15B. For instance, the nucleotide sequence can comprise a CAR construct or scFv of Table 11A or 11B. The nucleotide may encode a VH of Table 14A or 14B, a VL of Table 15A or 15B, or both. The nucleotide may encode one or more of (e.g., two or three of) a VH CDR1, VH CDR2, or VH CDR3 of Table 12A or 12B and/or the nucleotide may encode one or more of (e.g., two or three of) a VL CDR1, VL CDR2, or VL CDR3 of Table 13. The nucleotide sequence can also include one or more of, e.g., all of the domains of SEQ ID NOS: 13, 14, 15, 16, 17, and 51.

[0489] In another aspect, provided herein is a population of CAR-expressing cells, e.g., CART cells, comprising a mixture of cells expressing CD19 CARs and CD20 CARs. For example, in one embodiment, the population of CART cells can include a first cell expressing a CD19 CAR and a second cell expressing a CD20 CAR. In one embodiment, the population of CAR-expressing cells includes, e.g., a first cell expressing a CAR (e.g., a CD19 CAR, a ROR1 CAR, a CD20 CAR, or a CD22 CAR) that includes a primary intracellular signaling domain, and a second cell expressing a CAR (e.g., a CD19 CAR, a ROR1 CAR, a CD20 CAR, or a CD22 CAR)) that includes a secondary signaling domain.

[0490] The CD20 CAR may also comprise one or more of a transmembrane domain, e.g., a transmembrane domain as described herein, an intracellular signaling domain, e.g., intracellular signaling domain as described herein, a costimulatory domain, e.g., a costimulatory domain as described herein, a leader sequence, e.g. a leader sequence as described herein, or a hinge, e.g., a hinge as described herein.

[0491] Exemplary anti-CD20 antibodies include but are not limited to rituximab, ofatumumab, ocrelizumab, veltuzumab, obinutuzumab, TRU-015 (Trubion Pharmaceuticals), ocaratuzumab, and Pro131921 (Genentech). See, e.g., Lim et al. Haematologica. 95.1(2010):135-43.

[0492] In some embodiments, the anti-CD20 antibody comprises rituximab. Rituximab is a chimeric mouse/human monoclonal antibody IgG1 kappa that binds to CD20 and causes cytolysis of a CD20 expressing cell, e.g., as described in accessdata.fda.gov/drugsatfda_docs/label/2010/103705 s5311lbl.pdf. In some embodiments, rituximab can be used to treat B-cell malignancies, such as non-Hodgkin lymphoma (NHL) (e.g., follicular NHL, diffuse large B-cell lymphoma) and chronic lymphocytic leukemia (CLL). In other embodiments, rituximab can be used to treat autoimmune diseases, such as rheumatoid arthritis, multiple sclerosis, systemic lupus erythematosus, chronic inflammatory demyelinating polyneuropathy, autoimmune anemia, autoimmune hemolytic anemia, pure red cell aplasia, idiopathic thrombocytopenic purpura (ITP), Evans syndrome, vasculitis, bullous skin disorders, type 1 diabetes mellitus, Sjogren's syndrome, anti-NMDA receptor encephalitis and Devic's disease, Graves' ophthalmopathy, and autoimmune pancreatitis. In some embodiments, rituximab can be used to treat transplant rejection.

[0493] In some embodiments, rituximab is administered intravenously, e.g., as an intravenous infusion. For example, each infusion provides about 500-2000 mg (e.g., about 500-550, 550-600, 600-650, 650-700, 700-750, 750-800, 800-850, 850-900, 900-950, 950-1000, 1000-1100, 1100-1200, 1200-1300, 1300-1400, 1400-1500, 1500-1600, 1600-1700, 1700-1800, 1800-1900, or 1900-2000 mg) of rituximab.

[0494] In some embodiments, rituximab is administered at a dose of 150 mg/m² to 750 mg/m², e.g., about 150-175 mg/m², 175-200 mg/m², 200-225 mg/m², 225-250 mg/m², 250-300 mg/m², 300-325 mg/m², 325-350 mg/m², 350-375 mg/m², 375-400 mg/m², 400-425 mg/m², 425-450 mg/m², 450-475 mg/m², 475-500 mg/m², 500-525 mg/m², 525-550 mg/m², 550-575 mg/m², 575-600 mg/m², 600-625 mg/m², 625-650 mg/m², 650-675 mg/m², or 675-700 mg/m², where m² indicates the body surface area of the subject.

[0495] In some embodiments, rituximab is administered at a dosing interval of at least 4 days, e.g., 4, 7, 14, 21, 28, 35 days, or more. For example, rituximab is administered at a dosing interval of at least 0.5 weeks, e.g., 0.5, 1, 2, 3, 4, 5, 6, 7, 8 weeks, or more.

[0496] In some embodiments, rituximab is administered at a dose and dosing interval described herein for a period of time, e.g., at least 2 weeks, e.g., at least 2, 3, 4, 5, 6, 7, 8, 9, 10, 11, 12, 13, 14, 15, 16, 17, 18, 19, 20 weeks, or greater. For example, rituximab is administered at a dose and dosing interval described herein for a total of at least 4 doses per treatment cycle (e.g., at least 4, 5, 6, 7, 8, 9, 10, 11, 12, 13, 14, 15, 16, or more doses per treatment cycle).

[0497] In some aspects, the anti-CD20 antibody comprises ofatumumab. Ofatumumab is an anti-CD20 IgG1κ human monoclonal antibody with a molecular weight of approximately 149 kDa. For example, ofatumumab is generated using transgenic mouse and hybridoma technology and is expressed and purified from a recombinant murine cell line (NS0). See, e.g., accessdatafda.gov/drugsatfda_docs/label/2009/125326lbl.pdf; and Clinical Trial Identifier number NCT01363128, NCT01515176, NCT01626352, and NCT01397591.

[0498] Ofatumumab can be used to treat diseases such as CLL, non-Hodgkin lymphoma (NHL) (e.g., follicular NHL and DLBCL), B-Cell Prolymphocytic Leukemia, Acute Lymphoblastic Leukemia (ALL), mantle cell lymphoma, rheumatoid arthritis, and multiple sclerosis.

[0499] In some embodiments, ofatumumab is administered as an intravenous infusion. For example, each infusion provides about 150-3000 mg (e.g., about 150-200, 200-250, 250-300, 300-350, 350-400, 400-450, 450-500, 500-550, 550-600, 600-650, 650-700, 700-750, 750-800, 800-850, 850-900, 900-950, 950-1000, 1000-1200, 1200-1400, 1400-1600, 1600-1800, 1800-2000, 2000-2200, 2200-2400, 2400-2600, 2600-2800, or 2800-3000 mg) of ofatumumab.

[0500] In some embodiments, ofatumumab is administered at a dosing interval of at least 4 days, e.g., 4, 7, 14, 21, 28, 35 days, or more. For example, ofatumumab is administered at a dosing interval of at least 1 week, e.g., 1, 2, 3, 4, 5, 6, 7, 8, 9, 10, 11, 12, 24, 26, 28, 20, 22, 24, 26, 28, 30 weeks, or more.

[0501] In some embodiments, ofatumumab is administered at a dose and dosing interval described herein for a period of time, e.g., at least 1 week, e.g., 1, 2, 3, 4, 5, 6, 7, 8, 9, 10, 11, 12, 13, 14, 15, 16, 17, 18, 19, 20, 22, 24, 26, 28, 30, 40, 50, 60 weeks or greater, or 1, 2, 3, 4, 5, 6, 7, 8, 9, 10, 11, 12 months or greater, or 1, 2, 3, 4, 5 years or greater. For example, ofatumumab is administered at a dose and dosing interval described herein for a total of at least 2 doses per treatment cycle (e.g., at least 2, 3, 4, 5, 6, 7, 8, 9, 10, 11, 12, 13, 14, 15, 16, 18, 20, or more doses per treatment cycle).

[0502] In some aspects, the anti-CD20 antibody comprises ocrelizumab. Ocrelizumab is a humanized anti-CD20 monoclonal antibody, e.g., as described in Clinical Trials Identifier Nos. NCT00077870, NCT01412333, NCT00779220, NCT00673920, NCT01194570, and Kappos et al. Lancet. 19.378(2011):1779-87. For example, ocrelizumab can be used to treat diseases such as rheumatoid arthritis, multiple sclerosis, and lupus.

[0503] In some embodiments, ocrelizumab is administered as an intravenous infusion. For example, each infusion provides about 50-2000 mg (e.g., about 50-100, 100-150, 150-200, 200-250, 250-300, 300-350, 350-400, 400-450, 450-500, 500-550, 550-600, 600-650, 650-700, 700-750, 750-800, 800-850, 850-900, 900-950, 950-1000, 1000-1100, 1100-1200, 1200-1300, 1300-1400, 1400-1500, 1500-1600, 1600-1700, 1700-1800, 1800-1900, or 1900-2000 mg) of ocrelizumab.

[0504] In some embodiments, ocrelizumab is administered at a dosing interval of at least 7 days, e.g., 7, 14, 21, 28, 35 days, or more. For example, ocrelizumab is administered at a dosing interval of at least 1 week, e.g., 1, 2, 3, 4, 5, 6, 7, 8, 9, 10, 11, 12, 24, 26, 28, 20, 22, 24, 26, 28, 30 weeks, or more.

[0505] In some embodiments, ocrelizumab is administered at a dose and dosing interval described herein for a period of time, e.g., at least 2 weeks, e.g., at least 2, 3, 4, 5, 6, 7, 8, 9, 10, 11, 12, 13, 14, 15, 16, 17, 18, 19, 20, 22, 24, 26, 28, 30, 40, 50, 60 weeks or greater, or 1, 2, 3, 4, 5, 6, 7, 8, 9, 10, 11, 12 months or greater, or 1, 2, 3, 4, 5 years or greater. For example, ocrelizumab is administered at a dose and dosing interval described herein for a total of at least 4 doses per treatment cycle (e.g., at least 4, 5, 6, 7, 8, 9, 10, 11, 12, 13, 14, 15, 16, 18, 20, or more doses per treatment cycle).

[0506] In some aspects, the anti-CD20 antibody comprises veltuzumab. Veltuzumab is a humanized monoclonal antibody against CD20. See, e.g., Clinical Trial Identifier No. NCT00547066, NCT00546793, NCT01101581, and Goldenberg et al. Leuk Lymphoma. 51(5)(2010):747-55. For example, veltuzumab can be used to treat NHL (e.g., DLBCL, follicular lymphoma), CLL, and autoimmune diseases such as immune Thrombocytopenic Purpura (ITP).

[0507] In some embodiments, veltuzumab is administered subcutaneously or intravenously, e.g., as an intravenous infusion. In some embodiments, veltuzumab is administered at a dose of 50-800 mg/m², e.g., about 50-60, 60-70, 70-80, 80-90, 90-100, 100-110, 110-120, 120-130, 130-140, 140-150, 150-160, 160-170, 170-180, 180-190, 190-200, 200-225, 225-250, 250-275, 275-300, 300-325, 325-350, 350-375, 375-400, 400-425, 425-450, 450-475, 475-500, 500-525, 525-550, 550-575, 575-600, 600-625, 625-650, 650-675, 675-700, 700-725, 725-750, 750-775, or 775-800 mg/m². In some embodiments, a dose of 50-400 mg, e.g., 50, 75, 100, 125, 150, 175, 200, 225, 250, 275, 300, 325, 350, 375, or 400 mg of veltuzumab is administered.

[0508] In some embodiments, veltuzumab is administered at a dosing interval of at least 7 days, e.g., 7, 14, 21, 28, 35 days, or more. For example, veltuzumab is administered at a dosing interval of at least 1 week, e.g., 1, 2, 3, 4, 5, 6, 7, 8, 9, 10, 11, 12, 24, 26, 28, 20, 22, 24, 26, 28, weeks, or more.

[0509] In some embodiments, veltuzumab is administered at a dose and dosing interval described herein for a period of time, e.g., at least 2 weeks, e.g., at least 2, 3, 4, 5, 6, 7, 8, 9, 10, 11, 12, 13, 14, 15, 16, 17, 18, 19, 20, 22, 24, 26, 28, 30, 40, 50, 60 weeks or greater, or 1, 2, 3, 4, 5, 6, 7, 8, 9, 10, 11, 12 months or greater, or 1, 2, 3, 4, 5 years or greater. For example, veltuzumab is administered at a dose and dosing interval described herein for a total of at least 4 doses per treatment cycle (e.g., at least 4, 5, 6, 7, 8, 9, 10, 11, 12, 13, 14, 15, 16, 18, 20, or more doses per treatment cycle).

[0510] In some aspects, the anti-CD20 antibody comprises GA101. GA101 (also called obinutuzumab or R05072759) is a humanized and glyco-engineered anti-CD20 monoclonal antibody. For example, GA101 can be used to treat diseases such as B-cell lymphoid malignancies, e.g., CLL, non-Hodgkin lymphoma (NHL) and diffuse large B-cell lymphoma (DLBCL). See, e.g., Robak. Curr. Opin. Investig. Drugs. 10.6(2009):588-96; Clinical Trial Identifier Numbers: NCT01995669, NCT01889797, NCT02229422, and NCT01414205; and accessdata.fda.gov/drugsatfda_docs/label/2013/125486s000lbl.pdf.

[0511] In some embodiments, GA101 is administered intravenously, e.g., as an intravenous infusion. For example, each infusion provides about 100-3000 mg (e.g., about 100-150, 150-200, 200-250, 250-500, 300-350, 350-400, 400-450, 450-500, 500-550, 550-600, 600-650, 650-700, 700-750, 750-800, 800-850, 850-900, 900-950, 950-1000, 1000-1200, 1200-1400, 1400-1600, 1600-1800, 1800-2000, 2000-2200, 2200-2400, 2400-2600, 2600-2800, or 2800-3000 mg) of GA101.

[0512] In some embodiments, GA101 is administered at a dosing interval of at least 7 days, e.g., 7, 14, 21, 28, 35 days, or more. For example, GA101 is administered at a dosing interval of at least 1 week, e.g., 1, 2, 3, 4, 5, 6, 7, 8, 9, 10, 11, 12, 24, 26, 28, 20, 22, 24, 26, 28, 30 weeks, or more. For example, GA101 is administered at a dosing interval of at least 1 month, e.g., 1, 2, 3, 4, 5, 6, 7, 8, 9, 10, 11, 12, or more months. In some embodiments, GA101 is administered at a dosing interval of 1, 2, 3, 4, 5, 6, 7, 8, 9, 10, 11, 12, 13, or 14 days.

[0513] In some embodiments, GA101 is administered at a dose and dosing interval described herein for a period of time, e.g., at least 1 week, e.g., 1, 2, 3, 4, 5, 6, 7, 8, 9, 10, 11, 12, 13, 14, 15, 16, 17, 18, 19, 20, 22, 24, 26, 28, 30, 40, 50, 60 weeks or greater, or 1, 2, 3, 4, 5, 6, 7, 8, 9, 10, 11, 12 months or greater, or 1, 2, 3, 4, 5 years or greater. For example, GA101 is administered at a dose and dosing interval described herein for a total of at least 2 doses per treatment cycle (e.g., at least 2, 3, 4, 5, 6, 7, 8, 9, 10, 11, 12, 13, 14, 15, 16, 18, 20, or more doses per treatment cycle).

[0514] In some aspects, the anti-CD20 antibody comprises AME-133v. AME-133v (also called LY2469298 or ocaratuzumab) is a humanized IgG1 monoclonal antibody against CD20 with increased affinity for the FcγRIIIa receptor and an enhanced antibody dependent cellular cytotoxicity (ADCC) activity compared with rituximab. See, e.g., Robak et al. BioDrugs 25.1(2011):13-25. In some embodiments, AME-133v can be used to treat cancers such as NHL, e.g., follicular lymphoma. See, e.g., Forero-Torres et al. Clin Cancer Res. 18.5(2012):1395-403.

[0515] In some aspects, the anti-CD20 antibody comprises PRO131921. PRO131921 is a humanized anti-CD20 monoclonal antibody engineered to have better binding to FcγRIIIa and enhanced ADCC compared with rituximab. See, e.g., Robak et al. BioDrugs 25.1(2011):13-25; and Casulo et al. Clin Immunol. 154.1(2014):37-46. In some embodiments, PRO131921 can be used to treat NHL. See, e.g., Clinical Trial Identifier No. NCT00452127. In some embodiments, PRO131921 is administered intravenously, e.g., as an intravenous infusion. In some embodiments, PRO131921 is administered at a dose of 15 mg/m² to 1000 mg/m², e.g., about 15-20, 20-25, 25-30, 30-35, 35-40, 40-45, 45-50, 50-55, 55-60, 60-65, 65-70, 70-75, 75-80, 80-85, 85-90, 90-95, 95-100, 100-125, 125-150, 150-175, 175-200, 200-226, 225-250, 250-300, 300-325, 325-350, 350-375, 375-400, 400-425, 425-450, 450-475, 475-500, 500-525, 525-550, 550-575, 575-600, 600-625, 625-650, 650-675, 675-700, 700-725, 725-750, 750-775, 775-800, 800-825, 825-850, 850-875, 875-900, 900-925, 925-950, 950-975, or 975-1000 mg/m², where m² indicates the body surface area of the subject.

[0516] In some aspects, the anti-CD20 antibody comprises TRU-015. TRU-015 is an anti-CD20 fusion protein derived from domains of an antibody against CD20. TRU-015 is smaller than monoclonal antibodies, but retains Fc-mediated effector functions. See, e.g., Robak et al. BioDrugs 25.1(2011):13-25. TRU-015 contains an anti-CD20 single-chain variable fragment (scFv) linked to human IgG1 hinge, CH2, and CH3 domains but lacks CH1 and CL domains. In some embodiments, TRU-015 can be used to treat B-cell lymphomas and rheumatoid arthritis. In some cases, TRU-015 is administered intravenously, e.g., as an intravenous infusion. In some embodiments, TRU-015 is administered at a dose of 0.01-30 mg/kg, e.g., 0.01-0.015, 0.015-0.05, 0.05-0.15, 0.15-0.5, 0.5-1, 1-1.5, 1.5-2.5, 2.5-5, 5-10, 10-15, 15-20, 20-25, or 25-30 mg/kg body weight. In some embodiments, TRU-015 is administered at a dosing interval of at least 1 day, e.g., 1, 2, 3, 4, 5, 6, 7, 8, 9, 10, 11, 12, 13, or 14 days apart. See, e.g., Burge et al. Olin Tiler. 30.10(2008):1806-16.

[0517] In some embodiments, an anti-CD20 antibody described herein is conjugated or otherwise bound to a therapeutic agent, e.g., a chemotherapeutic agent (e.g., cytoxan, fludarabine, histone deacetylase inhibitor, demethylating agent, peptide vaccine, anti-tumor antibiotic, tyrosine kinase inhibitor, alkylating agent, anti-microtubule or anti-mitotic agent, CD20 antibody, or CD20 antibody drug conjugate described herein), anti-allergic agent, anti-nausea agent (or anti-emetic), pain reliever, or cytoprotective agent described herein.

[0518] CD22 Inhibitors and Binding Domains

[0519] As used herein, the term “CD22,” refers to an antigenic determinant known to be detectable on leukemia precursor cells. The human and murine amino acid and nucleic acid sequences can be found in a public database, such as GenBank, UniProt and Swiss-Prot. For example, the amino acid sequences of isoforms 1-5 human CD22 can be found at Accession Nos. NP 001762.2, NP 001172028.1, NP 001172029.1, NP 001172030.1, and NP 001265346.1, respectively, and the nucleotide sequence encoding variants 1-5 of the human CD22 can be found at Accession No. NM 001771.3, NM 001185099.1, NM 001185100.1, NM 001185101.1, and NM 001278417.1, respectively. As used herein, “CD22” includes proteins comprising mutations, e.g., point mutations, fragments, insertions, deletions and splice variants of full length wild-type CD22. In one aspect the antigen-binding portion of the CAR recognizes and binds an antigen within the extracellular domain of the CD22 protein. In one aspect, the CD22 protein is expressed on a cancer cell.

[0520] In some aspects, the present disclosure provides a CD22 inhibitor or binding domain, e.g., a CD22 inhibitor or binding domain as described herein. The disclosure also provides a nucleic acid encoding the CD22 binding domain, or a CAR comprising the CD22 binding domain. A CD22 inhibitor includes but is not limited to a CD22 CAR-expressing cell, e.g., a CD22 CART cell or an anti-CD22 antibody (e.g., an anti-CD22 mono- or bispecific antibody) or a fragment thereof. The composition may also comprise a second agent, e.g., an anti-CD19 CAR-expressing cell or a CD19 binding domain. The agents may be, e.g., encoded by a single nucleic acid or different nucleic acids.

[0521] In some aspects, a CD22 inhibitor or binding domain is administered as a monotherapy. In some aspects, the CD22 inhibitor or binding domain is administered in combination with a second agent such as an anti-CD19 CAR-expressing cell. In an embodiment, the CD22 inhibitor is administered in combination with a CD19 inhibitor, e.g., a CD19 CAR-expressing cell, e.g., a CAR-expressing cell described herein e.g., a cell expressing a CAR comprising an antibody binding domain that is murine, human, or humanized.

[0522] CD22 CAR-Expressing Cells, e.g., CARTs

[0523] In one embodiment, the CD22 inhibitor is a CD22 CAR-expressing cell, e.g., a CD22-CAR that comprises a CD22 binding domain and is engineered into a cell (e.g., T cell or NK cell) for administration in combination with CD19 CAR-expressing cell, e.g., CART, and methods of their use for adoptive therapy.

[0524] In another aspect, the present invention provides a population of CAR-expressing cells, e.g., CART cells, comprising a mixture of cells expressing CD19 CARs and CD22 CARs. For example, in one embodiment, the population of CART cells can include a first cell expressing a CD19 CAR and a second cell expressing a CD22 CAR. In one embodiment, the population of CAR-expressing cells includes, e.g., a first cell expressing a CAR (e.g., a CD19 CAR or CD22 CAR) that includes a primary intracellular signaling domain, and a second cell expressing a CAR (e.g., a CD19 CAR or CD22 CAR) that includes a secondary signaling domain.

[0525] In one aspect, the CD22-CAR comprises an optional leader sequence (e.g., an optional leader sequence described herein), an extracellular antigen binding domain, a hinge (e.g., hinge described herein), a transmembrane domain (e.g., transmembrane domain described herein), and an intracellular stimulatory domain (e.g., intracellular stimulatory domain described herein). In one aspect an exemplary CD22 CAR construct comprises an optional leader sequence (e.g., a leader sequence described herein), an extracellular antigen binding domain, a hinge, a transmembrane domain, an intracellular costimulatory domain (e.g., an intracellular costimulatory domain described herein) and an intracellular stimulatory domain.

[0526] In one aspect, the CAR22 binding domain comprises the scFv portion of an amino acid sequence (or encoded by a nucleotide sequence) provided in any of SEQ ID NOs: 200-428. In one aspect, the CAR22 binding domain comprises the scFv portion provided in any of SEQ ID NOs: 203, 209, 215, 221, 227, 232, 238, 244, 250, 256, 262, 268, 274, 280, 286, 292, 298, 304, 310, 316, 322, 328, 334, 340, 346, 352, 358, 364, 370, 376, 382, 388, 394, 400, 406, 412, 418, or 423.

[0527] In specific aspects, a CAR construct of the invention comprises a scFv domain selected from the group consisting of SEQ ID NOS: 203, 209, 215, 221, 227, 232, 238, 244, 250, 256, 262, 268, 274, 280, 286, 292, 298, 304, 310, 316, 322, 328, 334, 340, 346, 352, 358, 364, 370, 376, 382, 388, 394, 400, 406, 412, 418, or 423, wherein the scFv may be preceded by an optional leader sequence such as provided in SEQ ID NO: 13, and followed by an optional hinge sequence such as provided in SEQ ID NO:14 or SEQ ID NO:45 or SEQ ID NO:47 or SEQ ID NO:49, a transmembrane region such as provided in SEQ ID NO:15, an intracellular signalling domain that includes SEQ ID NO:16 or SEQ ID NO:51 and a CD3 zeta sequence that includes SEQ ID NO:17 or SEQ ID NO:43, e.g., wherein the domains are contiguous with and in the same reading frame to form a single fusion protein. In some embodiments, the scFv domain is a human scFv domain selected from the group consisting of SEQ ID NOS: 203, 209, 215, 221, 227, 232, 238, 244, 250, 256, 262, 268, 274, 280, 286, 292, 298, 304, 310, 316, 322, 328, 334, 340, 346, 352, 358, 364, 370, 376, 382, 388, 394, 400, 406, 412, 418, or 423.

[0528] Also included in the invention is a nucleotide sequence that encodes the polypeptide of each of the scFv fragments selected from the group consisting of SEQ ID NO: 203, 209, 215, 221, 227, 232, 238, 244, 250, 256, 262, 268, 274, 280, 286, 292, 298, 304, 310, 316, 322, 328, 334, 340, 346, 352, 358, 364, 370, 376, 382, 388, 394, 400, 406, 412, 418, or 423. Also included in the invention is a nucleotide sequence that encodes the polypeptide of each of the scFv fragments selected from the group consisting of SEQ ID NO: 203, 209, 215, 221, 227, 232, 238, 244, 250, 256, 262, 268, 274, 280, 286, 292, 298, 304, 310, 316, 322, 328, 334, 340, 346, 352, 358, 364, 370, 376, 382, 388, 394, 400, 406, 412, 418, or 423, and each of the domains of SEQ ID NOS: 13-17, plus the encoded CD22 CAR of the invention.

[0529] In some embodiments, full-length CD22 CAR sequences are also provided herein as SEQ ID NOS: 207, 213, 219, 225, 230, 236, 242, 248, 254, 260, 266, 272, 278, 284, 290, 296, 302, 308, 314, 320, 326, 332, 338, 344, 350, 356, 362, 368, 374, 380, 386, 392, 398, 404, 410, 416, 422, or 427, as shown in Table 6A or 6B.

[0530] In one aspect, the present invention encompasses a recombinant nucleic acid construct comprising a nucleic acid molecule encoding a CAR, wherein the nucleic acid molecule comprises the nucleic acid sequence encoding a CD22 binding domain, e.g., described herein, e.g., that is contiguous with and in the same reading frame as a nucleic acid sequence encoding an intracellular signaling domain. In one aspect, a CD22 binding domain is selected from one or more of SEQ ID NOS: 203, 209, 215, 221, 227, 232, 238, 244, 250, 256, 262, 268, 274, 280, 286, 292, 298, 304, 310, 316, 322, 328, 334, 340, 346, 352, 358, 364, 370, 376, 382, 388, 394, 400, 406, 412, 418, or 423. In one aspect, the present invention encompasses a recombinant nucleic acid construct comprising a nucleic acid molecule encoding a CAR, wherein the nucleic acid molecule comprises a nucleic acid sequence encoding a CD22 binding domain, e.g., wherein the sequence is contiguous with and in the same reading frame as the nucleic acid sequence encoding an intracellular signaling domain. An exemplary intracellular signaling domain that can be used in the CAR includes, but is not limited to, one or more intracellular signaling domains of, e.g., CD3-zeta, CD28, 4-1BB, and the like. In some instances, the CAR can comprise any combination of CD3-zeta, CD28, 4-1BB, and the like.

[0531] In one aspect, the nucleic acid sequence of a CAR construct of the invention comprises the CAR construct of one or more of SEQ ID NOS: 200, 208, 214, 220, 226, 231, 237, 243, 249, 255, 261, 267, 273, 279, 285, 291, 297, 303, 309, 315, 321, 327, 333, 339, 345, 351, 357, 363, 369, 375, 381, 387, 393, 399, 405, 411, 417, 422, or 428. In one aspect, the nucleic acid sequence of a CAR construct of the invention comprises an scFv-encoding sequence of one or more of SEQ ID NOs: 204, 210, 216, 222, 116, 233, 239, 245, 251, 257, 263, 269, 275, 281, 287, 293, 299, 305, 311, 317, 323, 329, 335, 341, 347, 353, 359, 365, 371, 377, 383, 389, 395, 401, 407, 413, 117, or 424.

[0532] In some instances, it is beneficial for the antigen binding domain to be derived from the same species in which the CAR will ultimately be used in. For example, for use in humans, it may be beneficial for the antigen binding domain of the CAR to comprise human or humanized residues for the antigen binding domain of an antibody or antibody fragment. Thus, in one aspect, the antigen binding domain comprises a human antibody or an antibody fragment. In one embodiment, the human CD22 binding domain comprises one or more (e.g., all three) light chain complementarity determining region 1 (LC CDR1), light chain complementarity determining region 2 (LC CDR2), and light chain complementarity determining region 3 (LC CDR3) of a human CD22 binding domain described herein, and/or one or more (e.g., all three) heavy chain complementarity determining region 1 (HC CDR1), heavy chain complementarity determining region 2 (HC CDR2), and heavy chain complementarity determining region 3 (HC CDR3) of a human CD22 binding domain described herein, e.g., a human CD22 binding domain comprising one or more, e.g., all three, LC CDRs and one or more, e.g., all three, HC CDRs. In one embodiment, the human CD22 binding domain comprises one or more (e.g., all three) heavy chain complementarity determining region 1 (HC CDR1), heavy chain complementarity determining region 2 (HC CDR2), and heavy chain complementarity determining region 3 (HC CDR3) of a human CD22 binding domain described herein, e.g., the human CD22 binding domain has two variable heavy chain regions, each comprising a HC CDR1, a HC CDR2 and a HC CDR3 described herein. In one embodiment, the human CD22 binding domain comprises a human light chain variable region described herein (e.g., in Table 6A, 6B, 10A or 10B) and/or a human heavy chain variable region described herein (e.g., in Table 6A, 6B, 9A or 9B). In one embodiment, the human CD22 binding domain comprises a human heavy chain variable region described herein (e.g., in Table 6A, 6B, 9A or 9B), e.g., at least two human heavy chain variable regions described herein (e.g., in Table 6A, 8B, 9A or 9B). In one embodiment, the CD22 binding domain is a scFv comprising a light chain and a heavy chain of an amino acid sequence of Table 6A, 6B, 9A, 9B, 10A, or 10B. In an embodiment, the CD22 binding domain (e.g., an scFv) comprises: a light chain variable region comprising an amino acid sequence having at least one, two or three modifications (e.g., substitutions) but not more than 30, 20 or 10 modifications (e.g., substitutions) of an amino acid sequence of a light chain variable region provided in Table 6A, 6B, 10A, or 10B, or a sequence with 95-99% identity with an amino acid sequence of Table 6A, 6B, 10A, or 10B; and/or a heavy chain variable region comprising an amino acid sequence having at least one, two or three modifications (e.g., substitutions) but not more than 30, 20 or 10 modifications (e.g., substitutions) of an amino acid sequence of a heavy chain variable region provided in Table 6A, 6B, 9A, or 9B, or a sequence with 95-99% identity to an amino acid sequence of Table 6A, 6B, 9A or 9B. In one embodiment, the human CD22 binding domain comprises a sequence selected from a group consisting of SEQ ID NO: 203, 209, 215, 221, 227, 232, 238, 244, 250, 256, 262, 268, 274, 280, 286, 292, 298, 304, 310, 316, 322, 328, 334, 340, 346, 352, 358, 364, 370, 376, 382, 388, 394, 400, 406, 412, 418, or 423, or a sequence with 95-99% identity thereof. In one embodiment, the human CD22 binding domain is a scFv, and a light chain variable region comprising an amino acid sequence described herein, e.g., in Table 6A, 6B, 10A, or 10B, is attached to a heavy chain variable region comprising an amino acid sequence described herein, e.g., in Table 6A, 6B, 9A, or 9B, via a linker, e.g., a linker described herein. In one embodiment, the human CD22 binding domain includes a (Gly₄-Ser)n linker, wherein n is 1, 2, 3, 4, 5, or 6, e.g., 3 or 4 (SEQ ID NO:53). The light chain variable region and heavy chain variable region of a scFv can be, e.g., in any of the following orientations: light chain variable region-linker-heavy chain variable region or heavy chain variable region-linker-light chain variable region.

[0533] In one aspect, the CD22 binding domain is characterized by particular functional features or properties of an antibody or antibody fragment. For example, in one aspect, the portion of a CAR composition of the invention that comprises an antigen binding domain specifically binds human CD22 or a fragment thereof. In one aspect, the invention relates to an antigen binding domain comprising an antibody or antibody fragment, wherein the antibody binding domain specifically binds to a CD22 protein or fragment thereof, wherein the antibody or antibody fragment comprises a variable heavy chain that includes an amino acid sequence of any of SEQ ID NOs: 700, 701, 702, 703, 704, 705, 706, 707, 708, 709, 710, 711, 712, 713, 714, 715, 716, 717, 718, 719, 720, 721, 722, 723, 724, 725, 726, 727, 728, 729, 730, 731, 732, 733, 734, 735, 736, 737, or 738, and/or a variable light chain that includes an amino acid sequence of any of SEQ ID NOs 739, 740, 741, 742, 743, 744, 745, 746, 747, 748, 749, 750, 751, 752, 753, 754, 755, 756, 757, 758, 759, 760, 761, 762, 763, 764, 765, 766, 767, 768, 769, 770, 771, 772, 773, 774, 775, 776, or 777. In certain aspects, the scFv is contiguous with and in the same reading frame as a leader sequence. In one aspect the leader sequence is the polypeptide sequence provided as SEQ ID NO:13.

[0534] In embodiments, the CAR comprises an antibody or antibody fragment which includes a CD22 binding domain, a transmembrane domain, and an intracellular signaling domain. In embodiments, the CD22 binding domain comprises one or more of light chain complementarity determining region 1 (LC CDR1), light chain complementarity determining region 2 (LC CDR2), and light chain complementarity determining region 3 (LC CDR3) of any CD22 light chain binding domain amino acid sequence listed in Table 8A, 8B, 10A or 10B, and one or more of heavy chain complementarity determining region 1 (HC CDR1), heavy chain complementarity determining region 2 (HC CDR2), and heavy chain complementarity determining region 3 (HC CDR3) of any CD22 heavy chain binding domain amino acid sequence listed in Table 7A, 7B, 7C, 9A, or 9B.

[0535] In one aspect, the CD22 binding domain is a fragment, e.g., a single chain variable fragment (scFv). In one aspect, the CD22 binding domain is a Fv, a Fab, a (Fab′)2, or a bi-functional (e.g. bi-specific) hybrid antibody (e.g., Lanzavecchia et al., Eur. J. Immunol. 17, 105 (1987)). In one aspect, the antibodies and fragments thereof of the invention binds a CD22 protein or a fragment thereof with wild-type or enhanced affinity.

[0536] In some instances, a human scFv can be derived from a display library.

[0537] In one embodiment, the CD22 binding domain, e.g., scFv comprises at least one mutation such that the mutated scFv confers improved stability to the CART22 construct. In another embodiment, the CD22 binding domain, e.g., scFv comprises at least 1, 2, 3, 4, 5, 6, 7, 8, 9, 10 mutations arising, e.g., from the humanization process such that the mutated scFv confers improved stability to the CART22 construct.

[0538] In one aspect, the present invention contemplates modifications of the starting antibody or fragment (e.g., scFv) amino acid sequence that generate functionally equivalent molecules. For example, the VH or VL of a CD22 binding domain, e.g., scFv, comprised in the CAR can be modified to retain at least about 70%, 71%. 72%. 73%, 74%, 75%, 76%, 77%, 78%, 79%, 80%, 81%, 82%, 83%, 84%, 85%, 86%, 87%, 88%, 89%, 90%, 91%, 92%, 93%, 94%, 95%, 96%, 97%, 98%, 99% identity of the starting VH or VL framework region of the CD22 binding domain, e.g., scFv. The present invention contemplates modifications of the entire CAR construct, e.g., modifications in one or more amino acid sequences of the various domains of the CAR construct in order to generate functionally equivalent molecules. The CAR construct can be modified to retain at least about 70%, 71%. 72%. 73%, 74%, 75%, 76%, 77%, 78%, 79%, 80%, 81%, 82%, 83%, 84%, 85%, 86%, 87%, 88%, 89%, 90%, 91%, 92%, 93%, 94%, 95%, 96%, 97%, 98%, 99% identity of the starting CAR construct.

[0539] In an embodiment, the CD22 binding domain comprises six CDRs (e.g., one each of a HC CDR1, HC CDR2, HC CDR3, LC CDR1, LC CDR2, and LC CDR3) of any one of CAR22-1, CAR22-2, CAR22-3, CAR22-4, CAR22-5, CAR22-6, CAR22-7, CAR22-8, CAR22-9, CAR22-10, CAR22-11, CAR22-12, CAR22-13, CAR22-14, CAR22-15, or CAR22-16, CAR22-17, CAR22-18, CAR22-19, CAR22-20, CAR22-21, CAR22-22, CAR22-23, CAR22-24, CAR22-25, CAR22-26, CAR22-27, CAR22-28, CAR22-29, CAR22-30, CAR22-31, CAR22-32, CAR22-33, CAR22-34, CAR22-35, CAR22-36, CAR22-37, or CAR22-38 (e.g., as described in Table 7A, 7B, 7C, 8A and/or 8B), or a sequence substantially identical thereto. In an embodiment, the CD22 binding domain comprises three CDRs (e.g., one each of a HC CDR1, HC CDR2, and HC CDR3, or one each of a LC CDR1, LC CDR2, and LC CDR3) of any one of CAR22-1, CAR22-2, CAR22-3, CAR22-4, CAR22-5, CAR22-6, CAR22-7, CAR22-8, CAR22-9, CAR22-10, CAR22-11, CAR22-12, CAR22-13, CAR22-14, CAR22-15, or CAR22-16, CAR22-17, CAR22-18, CAR22-19, CAR22-20, CAR22-21, CAR22-22, CAR22-23, CAR22-24, CAR22-25, CAR22-26, CAR22-27, CAR22-28, CAR22-29, CAR22-30, CAR22-31, CAR22-32, CAR22-33, CAR22-34, CAR22-35, CAR22-36, CAR22-37, or CAR22-38 (e.g., as described in Table 7A, 7B, 7C, 8A and/or 8B), or a sequence substantially identical thereto.

[0540] Further embodiments include a nucleotide sequence that encodes a polypeptide described in this section. For example, further embodiments include a nucleotide sequence that encodes a polypeptide of any of Tables 6A-10B. For instance, the nucleotide sequence can comprise a CAR construct or scFv of Table 6A or 6B. The nucleotide may encode a VH of Table 9A or 9B, a VL or Table 10A or 10B, or both. The nucleotide may encode one or more of (e.g., two or three of) a VH CDR1, VH CDR2, or VH CDR3 of Table 7A, 7B, or 7C and/or the nucleotide may encode one or more of (e.g., two or three of) a VL CDR1, VL CDR2, or VL CDR3 of Table 8A or 8B. The nucleotide sequence can also include one or more of, e.g., all of the domains of SEQ ID NOS: 13, 14, 15, 16, 17, and 51.

[0541] The CD22 CAR may also comprise one or more of a transmembrane domain, e.g., a transmembrane domain as described herein, an intracellular signaling domain, e.g., intracellular signaling domain as described herein, a costimulatory domain, e.g., a costimulatory domain as described herein, a leader sequence, e.g. a leader sequence as described herein, or a hinge, e.g., a hinge as described herein.

[0542] In one embodiment, the CD22 inhibitor is a CD22 inhibitor described herein. The CD22 inhibitor can be, e.g., an anti-CD22 antibody (e.g., an anti-CD22 mono- or bispecific antibody), a small molecule, or a CD22 CART. In some embodiments the anti-CD22 antibody is conjugated or otherwise bound to a therapeutic agent. Exemplary therapeutic agents include, e.g., microtubule disrupting agents (e.g., monomethyl auristatin E) and toxins (e.g., diphtheria toxin or Pseudomonas exotoxin-A, ricin). In an embodiment, the CD22 inhibitor is administered in combination with a CD19 inhibitor, e.g., a CD19 CAR-expressing cell, e.g., a CAR-expressing cell described herein e.g., a cell expressing a CAR comprising an antibody binding domain that is murine, human, or humanized.

[0543] In one embodiment, the anti-CD22 antibody is selected from an anti-CD19/CD22 bispecific ligand-directed toxin (e.g., two scFv ligands, recognizing human CD19 and CD22, linked to the first 389 amino acids of diphtheria toxin (DT), DT 390, e.g., DT2219ARL); anti-CD22 monoclonal antibody-MMAE conjugate (e.g., DCDT2980S); scFv of an anti-CD22 antibody RFB4 fused to a fragment of Pseudomonas exotoxin-A (e.g., BL22); deglycosylated ricin A chain-conjugated anti-CD19/anti-CD22 (e.g., Combotox); humanized anti-CD22 monoclonal antibody (e.g., epratuzumab); or the Fv portion of an anti-CD22 antibody covalently fused to a 38 KDa fragment of Pseudomonas exotoxin-A (e.g., moxetumomab pasudotox).

[0544] In one embodiment, the anti-CD22 antibody is an anti-CD19/CD22 bispecific ligand-directed toxin (e.g., DT2219ARL) and the anti-CD19/CD22 bispecific ligand-directed toxin is administered at a dose of about 1 μg/kg, 2 μg/kg, 3 μg/kg, 4 μg/kg, 5 μg/kg, 6 μg/kg, 7 μg/kg, 8 μg/kg, 9 μg/kg, 10 μg/kg, 11 μg/kg, 12 μg/kg, 13 μg/kg, 14 μg/kg, 15 μg/kg, 20 μg/kg, 25 μg/kg, 30 μg/kg, 40 μg/kg, 60 μg/kg, 80 μg/kg, 100 μg/kg, 120 μg/kg, 140 μg/kg, 160 μg/kg, 180 μg/kg, 200 μg/kg, 220 μg/kg, 250 μg/kg, 300 μg/kg, 350 μg/kg, 400 μg/kg, 450 μg/kg, 500 μg/kg, 600 μg/kg, 700 μg/kg, 800 μg/kg, 900 μg/kg, 1 mg·kg (e.g., 30 μg/kg, 40 μg/kg, 60 μg/kg, or 80 μg/kg) for a period of time, e.g., every 1, 2, 3, 4, 5, 6, 7, 8, 9, 10, 11, 12 or more days. In some embodiments, the anti-CD19/CD22 bispecific ligand-directed toxin is administered via intravenous infusion.

[0545] In one embodiment, the anti-CD22 antibody is BL22 and BL22 is administered at a dose of about 1 μg/kg, 2 μg/kg, 3 μg/kg, 4 μg/kg, 5 μg/kg, 6 μg/kg, 7 μg/kg, 8 μg/kg, 9 μg/kg, 10 μg/kg, 11 μg/kg, 12 μg/kg, 13 μg/kg, 14 μg/kg, 15 μg/kg, 20 μg/kg, 25 μg/kg, 30 μg/kg, 40 μg/kg, 60 μg/kg, 80 μg/kg, 100 μg/kg, 120 μg/kg, 140 μg/kg, 160 μg/kg, 180 μg/kg, 200 μg/kg, 220 μg/kg, 250 μg/kg, 300 μg/kg, 350 μg/kg, 400 μg/kg, 450 μg/kg, 500 μg/kg, 600 μg/kg, 700 μg/kg, 800 μg/kg, 900 μg/kg, 1 mg·kg (e.g., 3 μg/kg, 30 μg/kg, 40 μg/kg, or 50 μg/kg) for a period of time, e.g., every 1, 2, 3, 4, 5, 6, 7, 8, 9, 10, 11, 12 or more days. In some embodiments, BL22 is administered daily, every other day, every third, day, or every fourth day for a period of time, e.g., for a 4 day cycle, a 6 day cycle, an 8 day cycle, a 10 day cycle, a 12 day cycle, or a 14 day cycle. In one embodiment, 1, 2, 3, 4, 5, 6, 7, 8, 9, 10, 11, 12 or more cycles of BL22 are administered. In some embodiments, BL22 is administered via intravenous infusion.

[0546] In one embodiment, the anti-CD22 antibody is a deglycosylated ricin A chain-conjugated anti-CD19/anti-CD22 (e.g., Combotox) and the deglycosylated ricin A chain-conjugated anti-CD19/anti-CD22 is administered at a dose of about 500 μg/m², 600 μg/m², 700 μg/m², 800 μg/m², 900 μg/m², 1 mg/m², 2 mg/m², 3 mg/m², 4 mg/m², 5 mg/m², 6 mg/m², or 7 mg/m² for a period of time, e.g., every 1, 2, 3, 4, 5, 6, 7, 8, 9, 10, 11, or 12 or more days. In some embodiments, the deglycosylated ricin A chain-conjugated anti-CD19/anti-CD22 is administered daily, every other day, every third, day, or every fourth day for a period of time, e.g., for a 4 day cycle, a 6 day cycle, an 8 day cycle, a 10 day cycle, a 12 day cycle, or a 14 day cycle (e.g., every other day for 6 days). In one embodiment, 1, 2, 3, 4, 5, 6, 7, 8, 9, 10, 11, 12 or more cycles of the deglycosylated ricin A chain-conjugated anti-CD19/anti-CD22 are administered. In some embodiments, the deglycosylated ricin A chain-conjugated anti-CD19/anti-CD22 is administered via intravenous infusion.

[0547] In one embodiment, the anti-CD22 antibody is a humanized anti-CD22 monoclonal antibody (e.g., epratuzumab) and the humanized anti-CD22 monoclonal antibody is administered at a dose of about 10 mg/m²/week, 20 mg/m²/week, 50 mg/m²/week, 100 mg/m²/week, 120 mg/m²/week, 140 mg/m²/week, 160 mg/m²/week, 180 mg/m²/week, 200 mg/m²/week, 220 mg/m²/week, 250 mg/m²/week, 260 mg/m²/week, 270 mg/m²/week, 280 mg/m²/week, 290 mg/m²/week, 300 mg/m²/week, 305 mg/m²/week, 310 mg/m²/week, 320 mg/m²/week, 325 mg/m²/week, 330 mg/m²/week, 335 mg/m²/week, 340 mg/m²/week, 345 mg/m²/week, 350 mg/m²/week, 355 mg/m²/week, 360 mg/m²/week, 365 mg/m²/week, 370 mg/m²/week, 375 mg/m²/week, 380 mg/m²/week, 385 mg/m²/week, 390 mg/m²/week, 400 mg/m²/week, 410 mg/m²/week, 420 mg/m²/week, 430 mg/m²/week, 440 mg/m²/week, 450 mg/m²/week, 460 mg/m²/week, 470 mg/m²/week, 480 mg/m²/week, 490 mg/m²/week, 500 mg/m²/week, 600 mg/m²/week, 700 mg/m²/week, 800 mg/m²/week, 900 mg/m²/week, 1 g/m²/week, or 2 g/m²/week (e.g., 360 mg/m²/week or 480 mg/m²/week) for a period of time, e.g., every 1, 2, 3, 4, 5, 6, 7, 8, 9, 10, 11, 12 or more weeks. In some embodiments a first dose is lower than subsequent doses (e.g. a first dose of 360 mg/m²/week followed by subsequent doses of 370 mg/m²/week). In some embodiments, the humanized anti-CD22 monoclonal antibody is administered via intravenous infusion.

[0548] In one embodiment, the anti-CD22 antibody is moxetumomab pasudotox and moxetumomab pasudotox is administered at a dose of about 1 μg/kg, 2 μg/kg, 3 μg/kg, 4 μg/kg, 5 μg/kg, 6 μg/kg, 7 μg/kg, 8 μg/kg, 9 μg/kg, 10 μg/kg, 11 μg/kg, 12 μg/kg, 13 μg/kg, 14 μg/kg, 15 μg/kg, 20 μg/kg, 25 μg/kg, 30 μg/kg, 40 μg/kg, 60 μg/kg, 80 μg/kg, 100 μg/kg, 120 μg/kg, 140 μg/kg, 160 μg/kg, 180 μg/kg, 200 μg/kg, 220 μg/kg, 250 μg/kg, 300 μg/kg, 350 μg/kg, 400 μg/kg, 450 μg/kg, 500 μg/kg (e.g., 5 μg/kg, 10 μg/kg, 20 μg/kg, 30 μg/kg, 40 μg/kg, or 50 μg/kg) a period of time, e.g., every 1, 2, 3, 4, 5, 6, 7, 8, 9, 10, 11, 12 or more days. In some embodiments, the moxetumomab pasudotox is administered daily, every other day, every third, day, or every fourth day for a period of time, e.g., for a 4 day cycle, a 6 day cycle, an 8 day cycle, a 10 day cycle, a 12 day cycle, or a 14 day cycle (e.g., every other day for 6 days). In one embodiment, 1, 2, 3, 4, 5, 6, 7, 8, 9, 10, 11, 12 or more cycles of the moxetumomab pasudotox are administered. In some embodiments, the moxetumomab pasudotox is administered via intravenous infusion.

[0549] In an embodiment, a CD22 antibody molecule comprises six CDRs (e.g., one each of a HC CDR1, HC CDR2, HC CDR3, LC CDR1, LC CDR2, and LC CDR3) of any one of CAR22-1, CAR22-2, CAR22-3, CAR22-4, CAR22-5, CAR22-6, CAR22-7, CAR22-8, CAR22-9, CAR22-10, CAR22-11, CAR22-12, CAR22-13, CAR22-14, CAR22-15, or CAR22-16, CAR22-17, CAR22-18, CAR22-19, CAR22-20, CAR22-21, CAR22-22, CAR22-23, CAR22-24, CAR22-25, CAR22-26, CAR22-27, CAR22-28, CAR22-29, CAR22-30, CAR22-31, CAR22-32, CAR22-33, CAR22-34, CAR22-35, CAR22-36, CAR22-37, or CAR22-38 (e.g., as described in Table 7A, 7B, 7C, 8A and/or 8B), or a sequence substantially identical thereto. In an embodiment, a CD22 antibody molecule comprises three CDRs (e.g., one each of a HC CDR1, HC CDR2, and HC CDR3, or one each of a LC CDR1, LC CDR2, and LC CDR3) of any one of CAR22-1, CAR22-2, CAR22-3, CAR22-4, CAR22-5, CAR22-6, CAR22-7, CAR22-8, CAR22-9, CAR22-10, CAR22-11, CAR22-12, CAR22-13, CAR22-14, CAR22-15, or CAR22-16, CAR22-17, CAR22-18, CAR22-19, CAR22-20, CAR22-21, CAR22-22, CAR22-23, CAR22-24, CAR22-25, CAR22-26, CAR22-27, CAR22-28, CAR22-29, CAR22-30, CAR22-31, CAR22-32, CAR22-33, CAR22-34, CAR22-35, CAR22-36, CAR22-37, or CAR22-38 (e.g., as described in Table 7A, 7B, 7C, 8A, and/or 8B), or a sequence substantially identical thereto. In an embodiment, a CD22 antibody molecule comprises a heavy chain variable region, a light chain variable region, or both of a heavy chain variable region and light chain variable region, or an scFv, as described in Table 6A or 6B, or a sequence substantially identical thereto. In embodiments, the CD22 antibody molecule is an isolated antibody molecule.

[0550] ROR1 Inhibitors

[0551] As used herein, the term “ROR1” refers to an antigenic determinant known to be detectable on leukemia precursor cells. The human and murine amino acid and nucleic acid sequences can be found in a public database, such as GenBank, UniProt and Swiss-Prot. For example, the amino acid sequences of isoforms land 2 precursors of human ROR1 can be found at Accession Nos. NP_005003.2 and NP_001077061.1, respectively, and the mRNA sequences encoding them can be found at Accession Nos. NM_005012.3 and NM_001083592.1, respectively. As used herein, “ROR1” includes proteins comprising mutations, e.g., point mutations, fragments, insertions, deletions and splice variants of full length wild-type ROR1. In one aspect the antigen-binding portion of the CAR recognizes and binds an antigen within the extracellular domain of the ROR1 protein. In one aspect, the ROR1 protein is expressed on a cancer cell.

[0552] Also provided herein are ROR1 inhibitors and combination therapies. ROR1 inhibitors include but are not limited to anti-ROR1 CAR-expressing cells, e.g. CARTs, and anti-ROR antibodies (e.g., an anti-ROR1 mono- or bispecific antibody) and fragments thereof. In some embodiments, anti-ROR1 inhibitors can be used to treat B-cell malignancies (e.g., leukemias, such as CLL, and B-cell lymphomas, such as mantle cell lymphoma; ALL; small lymphocytic lymphoma; marginal cell B-Cell lymphoma; and Burkett's Lymphoma) or epithelial cancers (e.g., breast cancer, renal cell carcinoma, lung cancer, colorectal cancers, ovarian cancer, and melanoma). In an embodiment, the CD20 inhibitor is administered in combination with a CD19 inhibitor, e.g., a CD19 CAR-expressing cell, e.g., a CAR-expressing cell described herein, e.g., a cell expressing a CAR comprising an antibody binding domain that is murine, human, or humanized.

[0553] An exemplary anti-ROR1 inhibitor is described in Hudecek, et al. Clin. Cancer Res. 19.12(2013):3153-64, incorporated herein by reference. For example, an anti-ROR1 inhibitor includes the anti-ROR1 CARTs described in Hudecek et al. (for example, generated as described in Hudecek et al. at page 3155, first full paragraph, incorporated herein by reference). In other examples, an anti-ROR1 inhibitor includes an antibody or fragment thereof comprising the VH and/or VL sequences of the 2A2 and R12 anti-ROR1 monoclonal antibodies described in Hudecek et al. at paragraph bridging pages 3154-55; Baskar et al. MAbs 4(2012):349-61; and Yang et al. PLoS ONE 6(2011):e21018, incorporated herein by reference.

[0554] In other embodiments, a ROR1 inhibitor includes an antibody or fragment thereof (e.g., single chain variable fragment (scFv)) that targets ROR1, including those described in US 2013/0101607, e.g., SEQ ID NOs: 1 or 2 of US 2013/0101607, incorporated herein by reference. In some embodiments, anti-ROR1 antibody fragments (e.g., scFvs) are conjugated or fused to a biologically active molecule, e.g., to form a chimeric antigen receptor (CAR) that directs immune cells, e.g., T cells to respond to ROR1-expressing cells.

[0555] In some embodiments, an exemplary ROR1 inhibitor includes an anti-ROR1 monoclonal antibody called UC-961 (Cirmtuzumab). See, e.g., Clinical Trial Identifier No. NCT02222688. Cirmtuzumab can be used to treat cancers, such as chronic lymphocytic leukemia (CLL), ovarian cancer, and melanoma. See, e.g., Hojjat-Farsangi et al. PLoS One. 8(4): e61167; and NCT02222688.

[0556] In some embodiments, cirmtuzumab is administered intravenously, e.g., as an intravenous infusion. For example, each infusion provides about 700-7000 μg (e.g., 700-750, 750-800, 800-850, 850-900, 900-950, 950-1000, 1000-1500, 1500-2000, 2000-2500, 2500-3000, 3000-3500, 3500-4000, 4000-4500, 4500-5000, 5000-5500, 5500-6000, 6000-6500, or 6500-7000 μg) of cirmtuzumab. In other embodiments, cirmtuzumab is administered at a dose of 10-100 μg/kg body weight, e.g., 10-15, 15-20, 20-25, 25-30, 30-35, 35-40, 40-45, 45-50, 50-55, 55-60, 60-65, 65-70, 70-75, 75-80, 80-85, 85-90, 90-95, or 95-100 μg/kg body weight. In one embodiment, cirmtuzumab is administered at a starting dose of 15 μg/kg body weight.

[0557] In some embodiments, cirmtuzumab is administered at a dosing interval of at least 7 days, e.g., 7, 14, 21, 28, 35 days, or more. For example, cirmtuzumab is administered at a dosing interval of at least 1 week, e.g., 1, 2, 3, 4, 5, 6, 7, 8, 9, 10, 11, 12, 24, 26, 28, 20, 22, 24, 26, 28, 30 weeks, or more.

[0558] In some embodiments, cirmtuzumab is administered at a dose and dosing interval described herein for a period of time, e.g., at least 1 week, e.g., 1, 2, 3, 4, 5, 6, 7, 8, 9, 10, 11, 12, 13, 14, 15, 16, 17, 18, 19, 20, 22, 24, 26, 28, 30, 40, 50, 60 weeks or greater, or 1, 2, 3, 4, 5, 6, 7, 8, 9, 10, 11, 12 months or greater, or 1, 2, 3, 4, 5 years or greater. For example, cirmtuzumab is administered at a dose and dosing interval described herein for a total of at least 2 doses per treatment cycle (e.g., at least 2, 3, 4, 5, 6, 7, 8, 9, 10, 11, 12, 13, 14, 15, 16, 18, 20, or more doses per treatment cycle).

[0559] In some embodiments, the anti-ROR1 antibody is conjugated or otherwise bound to a therapeutic agent.

[0560] In some embodiments, a ROR1 inhibitor includes an anti-ROR1 CAR-expressing cell, e.g., CART, e.g., a cell expressing an anti-ROR1 CAR construct or encoded by a ROR1 binding CAR comprising a scFv, CDRs, or VH and VL chains. For example, an anti-ROR1 CAR-expressing cell, e.g., CART is a generated by engineering a ROR1-CAR (that comprises a ROR1 binding domain) into a cell (e.g., a T cell or NK cell), e.g., for administration in combination with a CAR-expressing cell described herein. Also provided herein are methods of use of the CAR-expressing cells described herein for adoptive therapy.

[0561] In another aspect, provided herein is a population of CAR-expressing cells, e.g., CART cells, comprising a mixture of cells expressing CD19 CARs and ROR1 CARs. For example, in one embodiment, the population of CART cells can include a first cell expressing a CD19 CAR and a second cell expressing a ROR1 CAR.

[0562] CD123 Inhibitors

[0563] CD123 is also called the alpha-chain of the interleukin-3 receptor (IL-3RA). The IL-3 receptor (IL-3R) is a heterodimer composed of alpha and beta chains. IL-3R is a membrane receptor. The IL-3Ra chain is a glycoprotein of 360 amino acid residues. Abnormalities of CD123 are frequently observed in some leukemic disorders. CD123 is overexpressed in multiple hematologic malignancies, e.g., acute myeloid and B-lymphoid leukemias, blastic plasmocytoid dendritic neoplasms (BPDCN) and hairy cell leukemia.

[0564] As used herein, the term “CD123” refers to an antigenic determinant known to be detectable on some malignant hematological cancer cells, e.g., leukemia cells. The human and murine amino acid and nucleic acid sequences can be found in a public database, such as GenBank, UniProt and Swiss-Prot. For example, the amino acid sequences of human CD123 can be found at Accession Nos. NP_002174.1 (isoform 1 precursor); NP_001254642.1 (isoform 2 precursor), and the mRNA sequences encoding them can be found at Accession Nos. NM_002183.3 (variant 1); NM_001267713.1 (variant 2). As used herein, “CD123” includes proteins comprising mutations, e.g., point mutations, fragments, insertions, deletions and splice variants of full length wild-type CD123. In one aspect the antigen-binding portion of the CAR recognizes and binds an antigen within the extracellular domain of the CD123 protein. In one aspect, the CD123 protein is expressed on a cancer cell.

[0565] Provided herein are CD123 inhibitors and combination therapies. CD123 inhibitors include but are not limited to small molecules, recombinant proteins, anti-CD123 CAR-expressing cells, e.g. CARTs, and anti-CD123 antibodies (e.g., an anti-CD123 mono- or bispecific antibody) and fragments thereof. In some embodiments, anti-CD123 inhibitors can be used to treat a B-cell malignancy described herein. In an embodiment, the CD123 inhibitor is administered in combination with a CD19 inhibitor, e.g., a CD19 CAR-expressing cell, e.g., a CAR-expressing cell described herein, e.g., a cell expressing a CAR comprising an antibody binding domain that is murine, human, or humanized.

[0566] In one embodiment, the CD123 inhibitor is a recombinant protein, e.g., comprising the natural ligand (or a fragment) of the CD123 receptor. For example, the recombinant protein is SL-401 (also called DT3881L3; University of Texas Southwestern Medical Center), which is a fusion protein comprising human IL-3 fused to a truncated diphtheria toxin. See, e.g., Testa et al. Biomark Res. 2014; 2: 4; and Clinical Trial Identifier No. NCT00397579.

[0567] In another embodiment, the CD123 inhibitor is an anti-CD123 antibody or fragment thereof. In one embodiment, the anti-CD123 antibody or fragment thereof comprises a monoclonal antibody, e.g., a monospecific or bispecific antibody or fragment thereof. For example, the anti-CD123 antibody or fragment thereof comprises CSL360 (CSL Limited). CSL360 is a recombinant chimeric monoclonal antibody that binds to CD123. In some embodiments, CSL360 is administered intravenously, e.g., by intravenous infusion. For example, CSL360 is administered at a dose of 0.1-10 mg/kg, e.g., 0.1-0.5 mg/kg, 0.5-1 mg/kg, 1-5 mg/kg, or 5-10 mg/kg. See, e.g., Clinical Trial Identifier No. NCT01632852; and Testa et al.

[0568] In another embodiment, the CD123 antibody or fragment thereof comprises CSL362 (CSL Limited). CSL362 is a humanized monoclonal antibody that targets the CD123 and is optimized for enhanced activation of antibody dependent cell-mediated cytotoxicity (ADCC). In some embodiments, CSL362 is administered intravenously, e.g., by intravenous infusion. In some examples, CSL362 is administered at a dose of 0.1-12 mg/kg, e.g., 0.1-0.2 mg/kg, 0.2-0.5 mg/kg, 0.5-1 mg/kg, 1-6 mg/kg, or 6-12 mg/kg. See, e.g., Clinical Trial Identifier No. NCT01632852.

[0569] In one embodiment, the CD123 antibody or fragment thereof comprises a bispecific antibody, e.g., MGD006 (MacroGenics). MGD006 is a bispecific antibody that targets CD123 and CD3. See, e.g., Clinical Trial Identifier No. NCT02152956.

[0570] In some embodiments, the CD123 inhibitor is conjugated or otherwise bound to a therapeutic agent.

[0571] In some embodiments, a CD123 inhibitor includes an anti-CD123 CAR-expressing cell, e.g., CART, e.g., a cell expressing an anti-CD123 CAR construct or encoded by a CD123 binding CAR comprising a scFv, CDRs, or VH and VL chains. For example, an anti-CD123 CAR-expressing cell, e.g., CART is a generated by engineering a CD123-CAR (that comprises a CD123 binding domain) into a cell (e.g., a T cell or NK cell), e.g., for administration in combination with a CAR-expressing cell described herein. In an embodiment, the anti-CD123 CAR construct comprises a scFv sequence, e.g., a scFv sequence provided in US 2014/0322212 A1, incorporated herein by reference. In one embodiment, the anti-CD123 binding domain is a scFv described in US 2014/0322212 A1. In an embodiment, the anti-CD123 binding domain is part of a CAR construct provided in US 2014/0322212 A1. Also provided herein are methods of use of the CAR-expressing cells described herein for adoptive therapy.

[0572] In another aspect, provided herein is a population of CAR-expressing cells, e.g., CART cells, comprising a mixture of cells expressing CD19 CARs and CD123 CARs. For example, in one embodiment, the population of CART cells can include a first cell expressing a CD19 CAR and a second cell expressing a CD123 CAR.

[0573] CD10 Inhibitors

[0574] Cluster of differentiation 10 (CD10) is also called Neprilysin, membrane metallo-endopeptidase (MME), neutral endopeptidase (NEP), and common acute lymphoblastic leukemia antigen (CALLA). CD10 is an enzyme encoded by the membrane metallo-endopeptidase (MME) gene. CD10 is expressed on leukemic cells of pre-B phenotype and is a common acute lymphocytic leukemia antigen.

[0575] As used herein, the term “CD10” refers to an antigenic determinant known to be detectable on leukemia cells. The human and murine amino acid and nucleic acid sequences can be found in a public database, such as GenBank, UniProt and Swiss-Prot. For example, the amino acid sequences of human CD10 can be found at Accession Nos. NP_009218.2; NP_000893.2; NP_009219.2; NP_009220.2, and the mRNA sequences encoding them can be found at Accession Nos. NM_007287.2 (variant 1bis); NM_000902.3 (variant 1); NM_007288.2 (variant 2a); NM_007289.2 (variant 2b). As used herein, “CD10” includes proteins comprising mutations, e.g., point mutations, fragments, insertions, deletions and splice variants of full length wild-type CD10. In one aspect the antigen-binding portion of the CAR recognizes and binds an antigen within the extracellular domain of the CD10 protein. In one aspect, the CD10 protein is expressed on a cancer cell.

[0576] Also provided herein are CD10 inhibitors and combination therapies. CD10 inhibitors include but are not limited to small molecules, recombinant proteins, anti-CD10 CAR-expressing cells, e.g. CARTs, and anti-CD10 antibodies (e.g., an anti-CD10 mono- or bispecific antibody) and fragments thereof. In some embodiments, anti-CD10 inhibitors can be used to treat a B-cell malignancy described herein. In an embodiment, the CD10 inhibitor is administered in combination with a CD19 inhibitor, e.g., a CD19 CAR-expressing cell, e.g., a CAR-expressing cell described herein, e.g., a cell expressing a CAR comprising an antibody binding domain that is murine, human, or humanized.

[0577] In an embodiment, the CD10 inhibitor comprises sacubitril (AHU-377; Novartis) (4-{[(2S,4R)-1-(4-Biphenylyl)-5-ethoxy-4-methyl-5-oxo-2-pentanyl]amino}-4-oxobutanoic acid), or a pharmaceutically acceptable salt or a derivative thereof. The structure of sacubitril is shown below.

[chemical structure]

[0578] In another embodiment, the CD10 inhibitor comprises valsartan/sacubritril (LCZ696; Novartis) or a pharmaceutically acceptable salt or a derivative thereof. Valsartan/sacubritril is a combination drug comprising a 1:1 mixture of valsartan and sacubitril. The structure of valsartan ((S)-3-methyl-2-(N-{[2′-(2H-1,2,3,4-tetrazol-5-yl)biphenyl-4-yl]methyl}pentanamido)butanoic acid) is shown below.

[chemical structure]

[0579] In an embodiment, the CD10 inhibitor comprises omapatrilat (Bristol-Myers Squibb) ((4S,7S,10aS)-5-oxo-4-{[(2S)-3-phenyl-2-sulfanylpropanoyl]amino}-2,3,4,7,8,9,10,10a-octahydropyrido[6,1-b][1,3]thiazepine-7-carboxylic acid), or a pharmaceutically acceptable salt or a derivative thereof. The structure of omapatrilat is shown below.

[chemical structure]

[0580] In an embodiment, the CD10 inhibitor comprises RB-101 (benzyl N-(3-{[(2S)-2-amino-4-(methylthio)butyl]dithio}-2-benzylpropanoyl)-L-phenylalaninate), or a pharmaceutically acceptable salt or a derivative thereof. The structure of RB-101 is shown below.

[chemical structure]

[0581] In an embodiment, the CD10 inhibitor comprises UK-414,495 (Pfizer) ((R)-2-({1-[(5-ethyl-1,3,4-thiadiazol-2-yl)carbamoyl]cyclopentyl}methyl)valeric acid), or a pharmaceutically acceptable salt or a derivative thereof. The structure of UK-414,495 is shown below.

[chemical structure]

[0582] In some embodiments, the CD10 inhibitor is conjugated or otherwise bound to a therapeutic agent.

[0583] In some embodiments, a CD10 inhibitor includes an anti-CD10 CAR-expressing cell, e.g., CART, e.g., a cell expressing an anti-CD10 CAR construct or encoded by a CD10 binding CAR comprising a scFv, CDRs, or VH and VL chains. For example, an anti-CD10 CAR-expressing cell, e.g., CART is a generated by engineering a CD10-CAR (that comprises a CD10 binding domain) into a cell (e.g., a T cell or NK cell), e.g., for administration in combination with a CAR-expressing cell described herein. Also provided herein are methods of use of the CAR-expressing cells described herein for adoptive therapy.

[0584] In another aspect, provided herein is a population of CAR-expressing cells, e.g., CART cells, comprising a mixture of cells expressing CD19 CARs and CD10 CARs. For example, in one embodiment, the population of CART cells can include a first cell expressing a CD19 CAR and a second cell expressing a CD10 CAR.

### CD34 Inhibitors

[0585] Cluster of differentiation 34 (CD34) is also called hematopoietic progenitor cell antigen CD34 and is a cell surface glycoprotein that functions as a cell-cell adhesion factor. CD34 is sometimes expressed on some cancers/tumors, e.g., alveolar soft part sarcoma, preB-ALL, AML, AML-M7, dermatofibrosarcoma protuberans, gastrointestinal stromal tumors, giant cell fibroblastoma, granulocytic sarcoma, Kaposi's sarcoma, liposarcoma, malignant fibrous histiocytoma, malignant peripheral nerve sheath tumors, mengingeal hemangiopericytomas, meningiomas, neurofibromas, schwannomas, and papillary thyroid carcinoma.

[0586] As used herein, the term “CD34” refers to an antigenic determinant known to be detectable on hematopoietic stem cells and some cancer cells. The human and murine amino acid and nucleic acid sequences can be found in a public database, such as GenBank, UniProt and Swiss-Prot. For example, the amino acid sequences of human CD34 can be found at Accession Nos. NP_001020280.1 (isoform a precursor); NP_001764.1 (isoform b precursor), and the mRNA sequences encoding them can be found at Accession Nos. NM_001025109.1 (variant 1); NM_001773.2 (variant 2). As used herein, “CD34” includes proteins comprising mutations, e.g., point mutations, fragments, insertions, deletions and splice variants of full length wild-type CD34. In one aspect the antigen-binding portion of the CAR recognizes and binds an antigen within the extracellular domain of the CD34 protein. In one aspect, the CD34 protein is expressed on a cancer cell.

[0587] Also provided herein are CD34 inhibitors and combination therapies. CD34 inhibitors include but are not limited to small molecules, recombinant proteins, anti-CD34 CAR-expressing cells, e.g. CARTs, and anti-CD34 antibodies (e.g., an anti-CD34 mono- or bispecific antibody) and fragments thereof. In some embodiments, anti-CD34 inhibitors can be used to treat a B-cell malignancy described herein. In an embodiment, the CD34 inhibitor is administered in combination with a CD19 inhibitor, e.g., a CD19 CAR-expressing cell, e.g., a CAR-expressing cell described herein, e.g., a cell expressing a CAR comprising an antibody binding domain that is murine, human, or humanized.

[0588] In an embodiment, the CD34 inhibitor comprises an antibody or fragment thereof, e.g., the My-10 monoclonal antibody or an immunoliposome comprising the My-10 monoclonal antibody, as described in Mercadal et al. Biochim. Biophys. Acta. 1371.1(1998):17-23. In other embodiments, the CD34 inhibitor comprises an immunoliposome containing a cancer drug, e.g., doxorubicin, that is targeted to CD34-expressing cells, as described in Carrion et al. Life Sci. 75.3(2004):313-28. In an embodiment, the CD34 inhibitor comprises a monoclonal antibody against CD34 as described in Maleki et al. Hum. Antibodies. 22(2013):1-8. In another embodiment, the CD34 inhibitor comprises a monoclonal antibody that targets CD34, as described in Maleki et al. Cell J. 16.3(2014):361-66.

[0589] In some embodiments, the CD34 inhibitor is conjugated or otherwise bound to a therapeutic agent.

[0590] In some embodiments, a CD34 inhibitor includes an anti-CD34 CAR-expressing cell, e.g., CART, e.g., a cell expressing an anti-CD34 CAR construct or encoded by a CD34 binding CAR comprising a scFv, CDRs, or VH and VL chains. For example, an anti-CD34 CAR-expressing cell, e.g., CART is a generated by engineering a CD34-CAR (that comprises a CD34 binding domain) into a cell (e.g., a T cell or NK cell), e.g., for administration in combination with a CAR-expressing cell described herein. Also provided herein are methods of use of the CAR-expressing cells described herein for adoptive therapy.

[0591] In another aspect, provided herein is a population of CAR-expressing cells, e.g., CART cells, comprising a mixture of cells expressing CD19 CARs and CD34 CARs. For example, in one embodiment, the population of CART cells can include a first cell expressing a CD19 CAR and a second cell expressing a CD34 CAR.

### FLT-3 Inhibitors

[0592] Fms-like tyrosine kinase 3 (FLT-3), also called Cluster of differentiation antigen 135 (CD135), receptor-type tyrosine-protein kinase FLT3, or fetal liver kinase-2 (Flk2), is a receptor tyrosine kinase. FLT-3 is a cytokine receptor for the ligand, cytokine Flt3 ligand (FLT3L). FLT-3 is expressed on the surface of many hematopoietic progenitor cells and is important for lymphocyte development. The FLT3 gene is commonly mutated in leukemia, e.g., acute myeloid leukemia (AML).

[0593] As used herein, the term “FLT-3” refers to an antigenic determinant known to be detectable on hematopoietic progenitor cells and some cancer cells, e.g., leukemia cells. The human and murine amino acid and nucleic acid sequences can be found in a public database, such as GenBank, UniProt and Swiss-Prot. For example, the amino acid sequences of human FLT-3 can be found at Accession Nos. NP_004110.2, and the mRNA sequences encoding them can be found at Accession Nos. NM_004119.2. As used herein, “FLT-3” includes proteins comprising mutations, e.g., point mutations, fragments, insertions, deletions and splice variants of full length wild-type FLT-3. In one aspect the antigen-binding portion of the CAR recognizes and binds an antigen within the extracellular domain of the FLT-3 protein. In one aspect, the FLT-3 protein is expressed on a cancer cell.

[0594] Also provided herein are FLT-3 inhibitors and combination therapies. FLT-3 inhibitors include but are not limited to small molecules, recombinant proteins, anti-FLT-3 CAR-expressing cells, e.g. CARTs, and anti-FLT-3 antibodies (e.g., an anti-FLT-3 mono- or bispecific antibody) and fragments thereof. In some embodiments, anti-FLT-3 inhibitors can be used to treat a B-cell malignancy described herein. In an embodiment, the FLT-3 inhibitor is administered in combination with a CD19 inhibitor, e.g., a CD19 CAR-expressing cell, e.g., a CAR-expressing cell described herein, e.g., a cell expressing a CAR comprising an antibody binding domain that is murine, human, or humanized.

[0595] In some embodiments, the FLT-3 inhibitor comprises quizartinib (AC220; Ambit Biosciences) or a pharmaceutically acceptable salt or a derivative thereof. Quizartinib is a small molecule receptor tyrosine kinase inhibitor. The structure of quizartinib (1-(5-(tert-Butyl)isoxazol-3-yl)-3-(4-(7-(2-morpholinoethoxy)benzo[d]imidazo[2,1-b]thiazol-2-yl)phenyl)urea) is shown below.

[chemical structure]

[0596] In some embodiments, the FLT-3 inhibitor comprises midostaurin is (PKC412; Technische Universitat Dresden) or a pharmaceutically acceptable salt or a derivative thereof. Midostaurin is a protein kinase inhibitor that is a semi-synthetic derivative of staurosporine, an alkaloid from the bacterium Streptomyces staurosporeus.

[0597] The structure of midostaurin ((9S,10R,11R,13R)-2,3,10,11,12,13-Hexahydro-10-methoxy-9-methyl-11-(methylamino)-9,13-epoxy-1H,9H-diindolo[1,2,3-gh:3′,2′,1′-lm]pyrrolo[3,4-j][1,7]benzodiamzonine-1-one) is shown below.

[chemical structure]

[0598] In some embodiments, midostaurin is administered orally, e.g., at a dose of about 25-200 mg, e.g., about 25-50 mg, 50-100 mg, 100-150 mg, or 150-200 mg. For example, midostaurin is administered, e.g., orally, at a dose of about 25-200 mg twice daily, e.g., about 25-50 mg, 50-100 mg, 100-150 mg, or 150-200 mg twice daily. See, e.g., Clinical Trial Identifier No. NCT01830361.

[0599] In an embodiment, the FLT-3 inhibitor comprises sorafenib (Bayer and Onyx Pharmaceuticals) or a pharmaceutically acceptable salt or a derivative thereof. Sorafenib is a small molecular inhibitor of multiple tyrosine protein kinases (e.g., VEGFR and PDGFR), Raf kinases (e.g., C-Raf and B-Raf), and some intracellular serine/threonine kinases (e.g. C-Raf, wild-type B-Raf, and mutant B-Raf). See, e.g., labeling.bayerhealthcare.com/html/products/pi/Nexavar_PI.pdf. The structure of sorafenib (4-[4-[[4-chloro-3-(trifluoromethyl)phenyl]carbamoylamino] phenoxy]-N-methyl-pyridine-2-carboxamide) is shown below.

[chemical structure]

[0600] In some embodiments, the FLT-3 inhibitor comprises sunitinib (previously known as SU11248; Pfizer) or a pharmaceutically acceptable salt or derivative thereof. Sunitinib is a small molecule oral drug that inhibits multiple receptor tyrosine kinases, including FLT3. Sunitinib has been approved by the Food and Drug Administration (FDA) for the treatment of renal cell carcinoma (RCC) and imatinib-resistant gastrointestinal stromal tumor (GIST). The structure of sunitinib (N-(2-diethylaminoethyl)-5-[(Z)-(5-fluoro-2-oxo-1H-indol-3-ylidene)methyl]-2,4-dimethyl-1H-pyrrole-3-carboxamide) is shown below.

[chemical structure]

[0601] In some embodiments, the FLT-3 inhibitor comprises lestaurtinib (CEP-701; Cephalon) or a pharmaceutically acceptable salt or derivative thereof. Lestaurtinib is a tyrosine kinase inhibitor that is structurally related to staurosporine. The structure of lestaurtinib ((9S,10S,12R)-2,3,9,10,11,12-Hexahydro-10-hydroxy-10-(hydroxymethyl)-9-methyl-9,12-epoxy-1H-diindolo[1,2,3-fg: 3′,2′,1′-kl]pyrrolo[3,4-i][1,6]benzodiazocin-1-one) is shown below.

[chemical structure]

[0602] In some embodiments, lestaurtinib is administered orally, e.g., at a dose of about 40-100 mg twice a day, e.g., about 40-60 mg, 50-70 mg, 60-80 mg, 70-90 mg, or 80-100 mg twice a day. See, e.g., Clinical Trial Identifier No. NCT00079482; or NCT00030186.

[0603] In some embodiments, the FLT-3 inhibitor is conjugated or otherwise bound to a therapeutic agent.

[0604] In some embodiments, a FLT-3 inhibitor includes an anti-FLT-3 CAR-expressing cell, e.g., CART, e.g., a cell expressing an anti-FLT-3 CAR construct or encoded by a FLT-3 binding CAR comprising a scFv, CDRs, or VH and VL chains. For example, an anti-FLT-3 CAR-expressing cell, e.g., CART is a generated by engineering a FLT-3-CAR (that comprises a FLT-3 binding domain) into a cell (e.g., a T cell or NK cell), e.g., for administration in combination with a CAR-expressing cell described herein. Also provided herein are methods of use of the CAR-expressing cells described herein for adoptive therapy.

[0605] In another aspect, provided herein is a population of CAR-expressing cells, e.g., CART cells, comprising a mixture of cells expressing CD19 CARs and FLT-3 CARs. For example, in one embodiment, the population of CART cells can include a first cell expressing a CD19 CAR and a second cell expressing a FLT-3 CAR.

[0606] In one embodiment the antigen binding domain CAR (e.g., a CD19, ROR1, CD20, CD22, CD123, CD10, CD34, or FLT-3 antigen binding domain) comprises an scFv portion, e.g., a human scFv portion. The scFv may be preceded by an optional leader sequence such as provided in SEQ ID NO: 13, and followed by an optional hinge sequence such as provided in SEQ ID NO: 14 or SEQ ID NO:45 or SEQ ID NO:47 or SEQ ID NO:49, a transmembrane region such as provided in SEQ ID NO:15, an intracellular signaling domain that includes SEQ ID NO:16 or SEQ ID NO:51 and a CD3 zeta sequence that includes SEQ ID NO:17 or SEQ ID NO:43, e.g., wherein the domains are contiguous with and in the same reading frame to form a single fusion protein.

[0607] In some embodiments, the present disclosure encompasses a recombinant nucleic acid construct comprising a nucleic acid molecule encoding a CAR (e.g., a CD19 CAR, a ROR1 CAR, a CD20 CAR, a CD22 CAR, a CD123 CAR, a CD10 CAR, a CD34 CAR, or a FLT-3 CAR), wherein the nucleic acid molecule comprises the nucleic acid sequence encoding an antigen binding domain, e.g., described herein, e.g., that is contiguous with and in the same reading frame as a nucleic acid sequence encoding an intracellular signaling domain. An exemplary intracellular signaling domain that can be used in the CAR includes, but is not limited to, one or more intracellular signaling domains of, e.g., CD3-zeta, CD28, 4-1BB, and the like. In some instances, the CAR can comprise any combination of CD3-zeta, CD28, 4-1BB, and the like.

[0608] In one embodiment, the antigen binding domain (e.g., a CD19, ROR1, CD20, CD22, CD123, CD10, CD34, or FLT-3 antigen binding domain) is characterized by particular functional features or properties of an antibody or antibody fragment. For example, in one embodiment, the portion of a CAR composition of the invention that comprises an antigen binding domain specifically binds a human B-cell antigen (e.g., CD19, ROR1, CD20, CD22, CD123, CD10, CD34, or FLT-3) or a fragment thereof. In certain embodiments, the scFv is contiguous with and in the same reading frame as a leader sequence. In one aspect the leader sequence is the polypeptide sequence provided as SEQ ID NO:13.

[0609] In one embodiment, the antigen binding domain is a fragment, e.g., a single chain variable fragment (scFv). In one embodiments, the antigen binding domain is a Fv, a Fab, a (Fab′)2, or a bi-functional (e.g. bi-specific) hybrid antibody (e.g., Lanzavecchia et al., Eur. J. Immunol. 17, 105 (1987)). In one aspect, the antibodies and fragments thereof of the invention binds a B-cell protein or a fragment thereof with wild-type or enhanced affinity. In some instances, a human scFv can be derived from a display library.

[0610] In one embodiment, the antigen binding domain, e.g., scFv comprises at least one mutation such that the mutated scFv confers improved stability to the CAR construct. In another embodiment, the antigen binding domain, e.g., scFv comprises at least 1, 2, 3, 4, 5, 6, 7, 8, 9, 10 mutations arising from, e.g., the humanization process such that the mutated scFv confers improved stability to the CAR construct.

[0611] In one embodiment, the population of CAR-expressing cells includes, e.g., a first cell expressing a CAR (e.g., a CD19 CAR, a ROR1 CAR, a CD20 CAR, a CD22 CAR, a CD123 CAR, a CD10 CAR, a CD34 CAR, or a FLT-3 CAR) that includes a primary intracellular signaling domain, and a second cell expressing a CAR (e.g., a CD19 CAR, a ROR1 CAR, a CD20 CAR, a CD22 CAR, a CD123 CAR, a CD10 CAR, a CD34 CAR, or a FLT-3 CAR)) that includes a secondary signaling domain.

[0612] CD79b Inhibitors

[0613] As used herein, the term “CD79b” refers to an antigenic determinant known to be detectable on some malignant hematological cancer cells, e.g., leukemia cells. The human and murine amino acid and nucleic acid sequences can be found in a public database, such as GenBank, UniProt and Swiss-Prot. For example, the amino acid sequences of human CD79b can be found at Accession Nos. NP_000617.1 (isoform 1 precursor), NP_067613.1 (isoform 2 precursor), or NP_001035022.1 (isoform 3 precursor), and the mRNA sequences encoding them can be found at Accession Nos. NM_900626.2 (transcript variant 1), NM_021602.2 (transcript variant 2), or NM_001039933.1 (transcript variant 3). As used herein, “CD79b” includes proteins comprising mutations, e.g., point mutations, fragments, insertions, deletions and splice variants of full length wild-type CD79b. In one aspect the antigen-binding portion of the CAR recognizes and binds an antigen within the extracellular domain of the CD79b protein. In one aspect, the CD79b protein is expressed on a cancer cell. In embodiments, the CD79b protein is a wild-type CD79b protein; in other embodiments, the CD79b protein is a mutant CD79b protein.

[0614] CD79b is also called immunoglobulin-associated beta, which is a component of the B lymphocyte antigen receptor multimeric complex. CD79b forms a heterodimer with another accessory protein called CD79a (immunoglobulin-associated alpha), and the heterodimer complexes with surface immunoglobulins on B cells. CD79b is important for the assembly of and surface expression of the B lymphocyte antigen receptor. CD79b and CD79a are important for pre-B-cell and B-cell development. Mutation and aberrant CD79b expression occurs in many B-CLL cells and may be correlated with the loss of surface expression and/or defective signaling of B lymphocyte antigen receptor in B-CLL. See, e.g., Thompson et al. Blood 90.4(1997):1387-94. In some cases, overexpression of a mutant form or splice variant of CD79b has been correlated with diminished B lymphocyte antigen receptor in B-CLL and other lymphoid malignancies. See, Cragg et al. Blood 100.9(2002):3065-76.

[0615] Provided herein are CD79b inhibitors and combination therapies. CD79b inhibitors include but are not limited to small molecules, recombinant proteins, anti-CD79b CAR-expressing cells, e.g. CARTs, and anti-CD79b antibodies (e.g., an anti-CD79b mono- or bispecific antibody) and fragments thereof. In some embodiments, anti-CD79b inhibitors can be used to treat a B-cell malignancy described herein. In an embodiment, the CD79b inhibitor is administered in combination with a CD19 inhibitor, e.g., a CD19 CAR-expressing cell, e.g., a CAR-expressing cell described herein, e.g., a cell expressing a CAR comprising an antibody binding domain that is murine, human, or humanized.

[0616] In an embodiment, the CD79b inhibitor is an anti-CD79b antibody or fragment thereof. In one embodiment, the anti-79b antibody or fragment thereof comprises a monoclonal antibody, e.g., a monospecific or bispecific antibody or fragment thereof. For example, the anti-CD79b antibody or fragment thereof comprises an anti-CD79b antibody drug conjugate such as polatuzumab vedotin (Roche). In embodiments, polatuzumab vedotin is used to treat a cancer, e.g., NHL, e.g., follicular lymphoma or DLBCL, e.g., relapsed or refractory follicular lymphoma or DLBCL. See, e.g., NCT02257567. In embodiments, the anti-CD79b antibody or fragment thereof is a bispecific antibody comprising components that bind to CD32B and D79B, such as MGD010 (MacroGenics). See, e.g., NCT02376036.

[0617] In some embodiments, the CD79b inhibitor is conjugated or otherwise bound to a therapeutic agent.

[0618] In some embodiments, a CD79b inhibitor includes an anti-CD79b CAR-expressing cell, e.g., CART, e.g., a cell expressing an anti-CD79b CAR construct or encoded by a CD79b binding CAR comprising a scFv, CDRs, or VH and VL chains. For example, an anti-CD79b CAR-expressing cell, e.g., CART is a generated by engineering a CD79b-CAR (that comprises a CD79b binding domain) into a cell (e.g., a T cell or NK cell), e.g., for administration in combination with a CAR-expressing cell described herein. Also provided herein are methods of use of the CAR-expressing cells described herein for adoptive therapy.

[0619] In another aspect, provided herein is a population of CAR-expressing cells, e.g., CART cells or CAR-expressing NK cells, comprising a mixture of cells expressing CD19 CARs and CD79b CARs. For example, in one embodiment, the population of CAR-expressing cells can include a first cell expressing a CD19 CAR and a second cell expressing a CD79b CAR.

[0620] C179b Inhibitors

[0621] As used herein, the term “CD179b” refers to an antigenic determinant known to be detectable on some malignant hematological cancer cells, e.g., leukemia cells. The human and murine amino acid and nucleic acid sequences can be found in a public database, such as GenBank, UniProt and Swiss-Prot. For example, the amino acid sequences of human CD179b can be found at Accession Nos. NP_064455.1 (isoform a precursor) or NP_690594.1 (isoform b precursor), and the mRNA sequences encoding them can be found at Accession Nos. NM_020070.3 (transcript variant 1) or NM_152855.2 (transcript variant 2). As used herein, “CD179b” includes proteins comprising mutations, e.g., point mutations, fragments, insertions, deletions and splice variants of full length wild-type CD179b. In one aspect the antigen-binding portion of the CAR recognizes and binds an antigen within the extracellular domain of the CD179b protein. In one aspect, the CD179b protein is expressed on a cancer cell. In embodiments, the CD179b protein is a wild-type CD179b protein; in other embodiments, the CD179b protein is a mutant CD179b protein.

[0622] CD179b is also called immunoglobulin lambda-like polypeptide 1 (IGLL1). CD179b is a subunit of a heterodimeric light chain that complexes with a membrane-bound Ig mu heavy chain. Together, the light chain and heavy chain form the preB cell receptor. Mutations in CD179b have been correlated with B cell deficiency and agammaglobulinemia. CD179b is expressed in some cancer cells, e.g., precursor B-cell lymphoblastic lymphoma cells.

[0623] Provided herein are CD179b inhibitors and combination therapies. CD179b inhibitors include but are not limited to small molecules, recombinant proteins, anti-CD179b CAR-expressing cells, e.g. CARTs, and anti-CD179b antibodies (e.g., an anti-CD179b mono- or bispecific antibody) and fragments thereof. In some embodiments, anti-CD179b inhibitors can be used to treat a B-cell malignancy described herein. In an embodiment, the CD179b inhibitor is administered in combination with a CD20 inhibitor, e.g., a CD19 CAR-expressing cell, e.g., a CAR-expressing cell described herein, e.g., a cell expressing a CAR comprising an antibody binding domain that is murine, human, or humanized.

[0624] In an embodiment, the CD179b inhibitor is an anti-CD179b antibody or fragment thereof. In one embodiment, the anti-179b antibody or fragment thereof comprises a monoclonal antibody, e.g., a monospecific or bispecific antibody or fragment thereof.

[0625] In some embodiments, the CD179b inhibitor is conjugated or otherwise bound to a therapeutic agent.

[0626] In some embodiments, a CD179b inhibitor includes an anti-CD179b CAR-expressing cell, e.g., CART, e.g., a cell expressing an anti-CD179b CAR construct or encoded by a CD179b binding CAR comprising a scFv, CDRs, or VH and VL chains. For example, an anti-CD179b CAR-expressing cell, e.g., CART is a generated by engineering a CD179b-CAR (that comprises a CD179b binding domain) into a cell (e.g., a T cell or NK cell), e.g., for administration in combination with a CAR-expressing cell described herein. Also provided herein are methods of use of the CAR-expressing cells described herein for adoptive therapy.

[0627] In another aspect, provided herein is a population of CAR-expressing cells, e.g., CART cells or CAR-expressing NK cells, comprising a mixture of cells expressing CD19 CARs and CD179b CARs. For example, in one embodiment, the population of CAR-expressing cells can include a first cell expressing a CD19 CAR and a second cell expressing a CD179b CAR.

[0628] CD79a Inhibitors

[0629] As used herein, the term “CD79a” refers to an antigenic determinant known to be detectable on some malignant hematological cancer cells, e.g., leukemia cells. The human and murine amino acid and nucleic acid sequences can be found in a public database, such as GenBank, UniProt and Swiss-Prot. For example, the amino acid sequences of human CD79a can be found at Accession Nos. NP_001774.1 (isoform 1 precursor) or NP_067612.1 (isoform 2 precursor), and the mRNA sequences encoding them can be found at Accession Nos. NM_001783.3 (transcript variant 1) or NM_021601.3 (transcript variant 2). As used herein, “CD79a” includes proteins comprising mutations, e.g., point mutations, fragments, insertions, deletions and splice variants of full length wild-type CD79a. In one aspect the antigen-binding portion of the CAR recognizes and binds an antigen within the extracellular domain of the CD79a protein. In one aspect, the CD79a protein is expressed on a cancer cell. In embodiments, the CD79a protein is a wild-type CD79a protein; in other embodiments, the CD79a protein is a mutant CD79a protein.

[0630] CD79a is also called immunoglobulin-associated alpha. CD79a heterodimerizes with CD79b to form a component of the B lymphocyte antigen receptor multimeric complex. CD79a is expressed in many hematological cancers, e.g., acute leukemias (e.g., B-cell Lymphomas, and Myelomas.

[0631] Provided herein are CD79a inhibitors and combination therapies. CD79a inhibitors include but are not limited to small molecules, recombinant proteins, anti-CD79a CAR-expressing cells, e.g. CARTs, and anti-CD79a antibodies (e.g., an anti-CD79a mono- or bispecific antibody) and fragments thereof. In some embodiments, anti-CD79a inhibitors can be used to treat a B-cell malignancy described herein. In an embodiment, the CD79a inhibitor is administered in combination with a CD19 inhibitor, e.g., a CD19 CAR-expressing cell, e.g., a CAR-expressing cell described herein, e.g., a cell expressing a CAR comprising an antibody binding domain that is murine, human, or humanized.

[0632] In an embodiment, the CD79a inhibitor is an anti-CD79a antibody or fragment thereof. In one embodiment, the anti-CD79a antibody or fragment thereof comprises a monoclonal antibody, e.g., a monospecific or bispecific antibody or fragment thereof. For example, the anti-CD79a antibody or fragment thereof comprises an anti-CD79a antibody or fragment thereof (e.g., variable regions or CDRs) described in Polson et al. Blood 1102(2007):616-23, incorporated herein by reference. For example, the anti-CD79a antibody or fragment thereof comprises the 7H7, 15E4, or 16C11 antibody or fragment thereof (e.g., variable regions or CDRs) described in Polson et al. See Id.

[0633] In some embodiments, the CD79a inhibitor is conjugated or otherwise bound to a therapeutic agent.

[0634] In some embodiments, a CD79a inhibitor includes an anti-CD79a CAR-expressing cell, e.g., CART, e.g., a cell expressing an anti-CD79a CAR construct or encoded by a CD79a binding CAR comprising a scFv, CDRs, or VH and VL chains. For example, an anti-CD79a CAR-expressing cell, e.g., CART is a generated by engineering a CD79a-CAR (that comprises a CD79a binding domain) into a cell (e.g., a T cell or NK cell), e.g., for administration in combination with a CAR-expressing cell described herein. Also provided herein are methods of use of the CAR-expressing cells described herein for adoptive therapy.

[0635] In another aspect, provided herein is a population of CAR-expressing cells, e.g., CART cells or CAR-expressing NK cells, comprising a mixture of cells expressing CD19 CARs and CD79a CARs. For example, in one embodiment, the population of CAR-expressing cells can include a first cell expressing a CD20 CAR and a second cell expressing a CD79a CAR.

[0636] CAR Therapies

[0637] The inhibitors herein, e.g., CAR-expressing cells directed against CD10, CD20, CD22, CD34, CD123, FLT-3, ROR1, CD79b, CD179b, or CD79a, may comprise one or more of the compositions described herein, e.g., a transmembrane domain, intracellular signaling domain, costimulatory domain, leader sequence, or hinge.

[0638] In one aspect, the present invention encompasses a recombinant nucleic acid construct comprising a transgene encoding a CAR. In some embodiments, the nucleic acid molecule comprises a nucleic acid sequence encoding an anti-CD19 binding domain selected from one or more of SEQ ID NOS:61-72, wherein the sequence is contiguous with and in the same reading frame as the nucleic acid sequence encoding an intracellular signaling domain. An exemplary intracellular signaling domain that can be used in the CAR includes, but is not limited to, one or more intracellular signaling domains of, e.g., CD3-zeta, CD28, 4-1BB, and the like. In some instances, the CAR can comprise any combination of CD3-zeta, CD28, 4-1BB, and the like.

[0639] In one aspect, the present invention contemplates modifications of the starting antibody or fragment (e.g., scFv) amino acid sequence that generate functionally equivalent molecules. For example, the VH or VL of an antigen binding domain, e.g., scFv, comprised in the CAR can be modified to retain at least about 70%, 71%. 72%. 73%, 74%, 75%, 76%, 77%, 78%, 79%, 80%, 81%, 82%, 83%, 84%, 85%, 86%, 87%, 88%, 89%, 90%, 91%, 92%, 93%, 94%, 95%, 96%, 97%, 98%, 99% identity of the starting VH or VL framework region of the antigen binding domain, e.g., scFv. The present invention contemplates modifications of the entire CAR construct, e.g., modifications in one or more amino acid sequences of the various domains of the CAR construct in order to generate functionally equivalent molecules. The CAR construct can be modified to retain at least about 70%, 71%. 72%. 73%, 74%, 75%, 76%, 77%, 78%, 79%, 80%, 81%, 82%, 83%, 84%, 85%, 86%, 87%, 88%, 89%, 90%, 91%, 92%, 93%, 94%, 95%, 96%, 97%, 98%, 99% identity of the starting CAR construct. The present invention also contemplates modifications of CDRs, e.g., modifications in one or more amino acid sequences of one or more CDRs of a CAR construct in order to generate functionally equivalent molecules. For instance, the CDR may have, e.g., up to and including 1, 2, 3, 4, 5, or 6 alterations (e.g., substitutions) relative to a CDR sequence provided herein.

[0640] The nucleic acid sequences coding for the desired molecules can be obtained using recombinant methods known in the art, such as, for example by screening libraries from cells expressing the gene, by deriving the gene from a vector known to include the same, or by isolating directly from cells and tissues containing the same, using standard techniques. Alternatively, the nucleic acid of interest can be produced synthetically, rather than cloned.

[0641] The present invention includes, among other things, retroviral and lentiviral vector constructs expressing a CAR that can be directly transduced into a cell.

[0642] The present invention also includes an RNA construct that can be directly transfected into a cell. A method for generating mRNA for use in transfection involves in vitro transcription (IVT) of a template with specially designed primers, followed by polyA addition, to produce a construct containing 3′ and 5′ untranslated sequence (“UTR”), a 5′ cap and/or Internal Ribosome Entry Site (IRES), the nucleic acid to be expressed, and a polyA tail, typically 50-2000 bases in length (SEQ ID NO:118). RNA so produced can efficiently transfect different kinds of cells. In one embodiment, the template includes sequences for the CAR. In an embodiment, an RNA CAR vector is transduced into a T cell by electroporation.

[0643] Antigen Binding Domain

[0644] In one aspect, the CAR of the invention comprises a target-specific binding element otherwise referred to as an antigen binding domain. The choice of moiety depends upon the type and number of ligands that define the surface of a target cell. For example, the antigen binding domain may be chosen to recognize a ligand that acts as a cell surface marker on target cells associated with a particular disease state. Thus examples of cell surface markers that may act as ligands for the antigen binding domain in a CAR of the invention include those associated with viral, bacterial and parasitic infections, autoimmune disease and cancer cells. The antigen-binding domain can bind, e.g., one or more of CD10, CD19, CD20, CD22, CD34, CD123, FLT-3, ROR1, CD79b, CD179b, or CD79a.

[0645] In one aspect, the CAR-mediated T-cell response can be directed to an antigen of interest by way of engineering an antigen binding domain that specifically binds a desired antigen into the CAR.

[0646] The antigen binding domain (e.g., an antigen-binding domain that binds one or more of CD10, CD19, CD20, CD22, CD34, CD123, FLT-3, ROR1, CD79b, CD179b, or CD79a) can be any domain that binds to the antigen including but not limited to a monoclonal antibody, a polyclonal antibody, a recombinant antibody, a murine antibody, a human antibody, a humanized antibody, and a functional fragment thereof, including but not limited to a single-domain antibody such as a heavy chain variable domain (VH), a light chain variable domain (VL) and a variable domain (VHH) of camelid derived nanobody, and to an alternative scaffold known in the art to function as antigen binding domain, such as a recombinant fibronectin domain, and the like.

[0647] In some instances, it is beneficial for the antigen binding domain to be derived from the same species in which the CAR will ultimately be used in. For example, for use in humans, it may be beneficial for the antigen binding domain (e.g., an antigen-binding domain that binds one or more of CD10, CD19, CD20, CD22, CD34, CD123, FLT-3, ROR1, CD79b, CD179b, or CD79a) of the CAR to comprise human or humanized residues for the antigen binding domain of an antibody or antibody fragment.

[0648] A humanized antibody can be produced using a variety of techniques known in the art, including but not limited to, CDR-grafting (see, e.g., European Patent No. EP 239,400; International Publication No. WO 91/09967; and U.S. Pat. Nos. 5,225,539, 5,530,101, and 5,585,089, each of which is incorporated herein in its entirety by reference), veneering or resurfacing (see, e.g., European Patent Nos. EP 592,106 and EP 519,596; Padlan, 1991, Molecular Immunology, 28(4/5):489-498; Studnicka et al., 1994, Protein Engineering, 7(6):805-814; and Roguska et al., 1994, PNAS, 91:969-973, each of which is incorporated herein by its entirety by reference), chain shuffling (see, e.g., U.S. Pat. No. 5,565,332, which is incorporated herein in its entirety by reference), and techniques disclosed in, e.g., U.S. Patent Application Publication No. US2005/0042664, U.S. Patent Application Publication No. US2005/0048617, U.S. Pat. Nos. 6,407,213, 5,766,886, International Publication No. WO 9317105, Tan et al., J. Immunol., 169:1119-25 (2002), Caldas et al., Protein Eng., 13(5):353-60 (2000), Morea et al., Methods, 20(3):267-79 (2000), Baca et al., J. Biol. Chem., 272(16):10678-84 (1997), Roguska et al., Protein Eng., 9(10):895-904 (1996), Couto et al., Cancer Res., 55 (23 Supp):5973s-5977s (1995), Couto et al., Cancer Res., 55(8):1717-22 (1995), Sandhu J S, Gene, 150(2):409-10 (1994), and Pedersen et al., J. Mol. Biol., 235(3):959-73 (1994), each of which is incorporated herein in its entirety by reference. Often, framework residues in the framework regions will be substituted with the corresponding residue from the CDR donor antibody to alter, for example improve, antigen binding. These framework substitutions are identified by methods well-known in the art, e.g., by modeling of the interactions of the CDR and framework residues to identify framework residues important for antigen binding and sequence comparison to identify unusual framework residues at particular positions. (See, e.g., Queen et al., U.S. Pat. No. 5,585,089; and Riechmann et al., 1988, Nature, 332:323, which are incorporated herein by reference in their entireties.)

[0649] A humanized antibody or antibody fragment has one or more amino acid residues remaining in it from a source which is nonhuman. These nonhuman amino acid residues are often referred to as “import” residues, which are typically taken from an “import” variable domain. As provided herein, humanized antibodies or antibody fragments comprise one or more CDRs from nonhuman immunoglobulin molecules and framework regions wherein the amino acid residues comprising the framework are derived completely or mostly from human germline. Multiple techniques for humanization of antibodies or antibody fragments are well-known in the art and can essentially be performed following the method of Winter and co-workers (Jones et al., Nature, 321:522-525 (1986); Riechmann et al., Nature, 332:323-327 (1988); Verhoeyen et al., Science, 239:1534-1536 (1988)), by substituting rodent CDRs or CDR sequences for the corresponding sequences of a human antibody, i.e., CDR-grafting (EP 239,400; PCT Publication No. WO 91/09967; and U.S. Pat. Nos. 4,816,567; 6,331,415; 5,225,539; 5,530,101; 5,585,089; 6,548,640, the contents of which are incorporated herein by reference herein in their entirety). In such humanized antibodies and antibody fragments, substantially less than an intact human variable domain has been substituted by the corresponding sequence from a nonhuman species. Humanized antibodies are often human antibodies in which some CDR residues and possibly some framework (FR) residues are substituted by residues from analogous sites in rodent antibodies. Humanization of antibodies and antibody fragments can also be achieved by veneering or resurfacing (EP 592,106; EP 519,596; Padlan, 1991, Molecular Immunology, 28(4/5):489-498; Studnicka et al., Protein Engineering, 7(6):805-814 (1994); and Roguska et al., PNAS, 91:969-973 (1994)) or chain shuffling (U.S. Pat. No. 5,565,332), the contents of which are incorporated herein by reference herein in their entirety.

[0650] The choice of human variable domains, both light and heavy, to be used in making the humanized antibodies is to reduce antigenicity. According to the so-called “best-fit” method, the sequence of the variable domain of a rodent antibody is screened against the entire library of known human variable-domain sequences. The human sequence which is closest to that of the rodent is then accepted as the human framework (FR) for the humanized antibody (Sims et al., J. Immunol., 151:2296 (1993); Chothia et al., J. Mol. Biol., 196:901 (1987), the contents of which are incorporated herein by reference herein in their entirety). Another method uses a particular framework derived from the consensus sequence of all human antibodies of a particular subgroup of light or heavy chains. The same framework may be used for several different humanized antibodies (see, e.g., Nicholson et al. Mol. Immun. 34 (16-17): 1157-1165 (1997); Carter et al., Proc. Natl. Acad. Sci. USA, 89:4285 (1992); Presta et al., J. Immunol., 151:2623 (1993), the contents of which are incorporated herein by reference herein in their entirety). In some embodiments, the framework region, e.g., all four framework regions, of the heavy chain variable region are derived from a VH4_4-59 germline sequence. In one embodiment, the framework region can comprise, one, two, three, four or five modifications, e.g., substitutions, e.g., from the amino acid at the corresponding murine sequence (e.g., of SEQ ID NO:59). In one embodiment, the framework region, e.g., all four framework regions of the light chain variable region are derived from a VK3_1.25 germline sequence. In one embodiment, the framework region can comprise, one, two, three, four or five modifications, e.g., substitutions, e.g., from the amino acid at the corresponding murine sequence (e.g., of SEQ ID NO:59).

[0651] In some aspects, the portion of a CAR composition of the invention that comprises an antibody fragment is humanized with retention of high affinity for the target antigen and other favorable biological properties. According to one aspect of the invention, humanized antibodies and antibody fragments are prepared by a process of analysis of the parental sequences and various conceptual humanized products using three-dimensional models of the parental and humanized sequences. Three-dimensional immunoglobulin models are commonly available and are familiar to those skilled in the art. Computer programs are available which illustrate and display probable three-dimensional conformational structures of selected candidate immunoglobulin sequences. Inspection of these displays permits analysis of the likely role of the residues in the functioning of the candidate immunoglobulin sequence, e.g., the analysis of residues that influence the ability of the candidate immunoglobulin to bind the target antigen. In this way, FR residues can be selected and combined from the recipient and import sequences so that the desired antibody or antibody fragment characteristic, such as increased affinity for the target antigen, is achieved. In general, the CDR residues are directly and most substantially involved in influencing antigen binding.

[0652] A humanized antibody or antibody fragment may retain a similar antigenic specificity as the original antibody, e.g., in the present invention, the ability to bind human CD19, CD20, or CD22. In some embodiments, a humanized antibody or antibody fragment may have improved affinity and/or specificity of binding to human CD19, CD20, or CD22.

[0653] In one aspect, the binding domain (e.g., an antigen-binding domain that binds one or more of CD10, CD19, CD20, CD22, CD34, CD123, FLT-3, ROR1, CD79b, CD179b, or CD79a) is a fragment, e.g., a single chain variable fragment (scFv). In one aspect, the binding domain is a Fv, a Fab, a (Fab′)2, or a bi-functional (e.g. bi-specific) hybrid antibody (e.g., Lanzavecchia et al., Eur. J. Immunol. 17, 105 (1987)). In one aspect, the antibodies and fragments thereof of the invention binds a CD19, CD20, or CD22 protein with wild-type or enhanced affinity.

[0654] In some instances, scFvs can be prepared according to method known in the art (see, for example, Bird et al., (1988) Science 242:423-426 and Huston et al., (1988) Proc. Natl. Acad. Sci. USA 85:5879-5883). ScFv molecules can be produced by linking VH and VL regions together using flexible polypeptide linkers. The scFv molecules comprise a linker (e.g., a Ser-Gly linker) with an optimized length and/or amino acid composition. The linker length can greatly affect how the variable regions of a scFv fold and interact. In fact, if a short polypeptide linker is employed (e.g., between 5-10 amino acids) intrachain folding is prevented. Interchain folding is also required to bring the two variable regions together to form a functional epitope binding site. For examples of linker orientation and size see, e.g., Hollinger et al. 1993 Proc Natl Acad. Sci. U.S.A. 90:6444-6448, U.S. Patent Application Publication Nos. 2005/0100543, 2005/0175606, 2007/0014794, and PCT publication Nos. WO2006/020258 and WO2007/024715, is incorporated herein by reference.

[0655] An scFv can comprise a linker of at least 1, 2, 3, 4, 5, 6, 7, 8, 9, 10, 11, 12, 13, 14, 15, 16, 17, 18, 19, 20, 25, 30, 35, 40, 45, 50, or more amino acid residues between its VL and VH regions. The linker sequence may comprise any naturally occurring amino acid. In some embodiments, the linker sequence comprises amino acids glycine and serine. In another embodiment, the linker sequence comprises sets of glycine and serine repeats such as (Gly₄Ser)n, where n is a positive integer equal to or greater than 1 (SEQ ID NO:18). In one embodiment, the linker can be (Gly₄Ser)₄ (SEQ ID NO:106) or (Gly₄Ser)₃ (SEQ ID NO:107). Variation in the linker length may retain or enhance activity, giving rise to superior efficacy in activity studies.

[0656] In some embodiments, the amino acid sequence of the antigen binding domain (e.g., an antigen-binding domain that binds one or more of CD10, CD19, CD20, CD22, CD34, CD123, FLT-3, ROR1, CD79b, CD179b, or CD79a) or other portions or the entire CAR) can be modified, e.g., an amino acid sequence described herein can be modified, e.g., by a conservative substitution. Families of amino acid residues having similar side chains have been defined in the art, including basic side chains (e.g., lysine, arginine, histidine), acidic side chains (e.g., aspartic acid, glutamic acid), uncharged polar side chains (e.g., glycine, asparagine, glutamine, serine, threonine, tyrosine, cysteine), nonpolar side chains (e.g., alanine, valine, leucine, isoleucine, proline, phenylalanine, methionine, tryptophan), beta-branched side chains (e.g., threonine, valine, isoleucine) and aromatic side chains (e.g., tyrosine, phenylalanine, tryptophan, histidine).

[0657] Percent identity in the context of two or more nucleic acids or polypeptide sequences, refers to two or more sequences that are the same. Two sequences are “substantially identical” if two sequences have a specified percentage of amino acid residues or nucleotides that are the same (e.g., 60% identity, optionally 70%, 71%. 72%. 73%, 74%, 75%, 76%, 77%, 78%, 79%, 80%, 81%, 82%, 83%, 84%, 85%, 86%, 87%, 88%, 89%, 90%, 91%, 92%, 93%, 94%, 95%, 96%, 97%, 98%, 99% identity over a specified region, or, when not specified, over the entire sequence), when compared and aligned for maximum correspondence over a comparison window, or designated region as measured using one of the following sequence comparison algorithms or by manual alignment and visual inspection. Optionally, the identity exists over a region that is at least about 50 nucleotides (or 10 amino acids) in length, or over a region that is 100 to 500 or 1000 or more nucleotides (or 20, 50, 200 or more amino acids) in length.

[0658] For sequence comparison, typically one sequence acts as a reference sequence, to which test sequences are compared. When using a sequence comparison algorithm, test and reference sequences are entered into a computer, subsequence coordinates are designated, if necessary, and sequence algorithm program parameters are designated. Default program parameters can be used, or alternative parameters can be designated. The sequence comparison algorithm then calculates the percent sequence identities for the test sequences relative to the reference sequence, based on the program parameters. Methods of alignment of sequences for comparison are well known in the art. Optimal alignment of sequences for comparison can be conducted, e.g., by the local homology algorithm of Smith and Waterman, (1970) Adv. Appl. Math. 2:482c, by the homology alignment algorithm of Needleman and Wunsch, (1970) J. Mol. Biol. 48:443, by the search for similarity method of Pearson and Lipman, (1988) Proc. Nat'l. Acad. Sci. USA 85:2444, by computerized implementations of these algorithms (GAP, BESTFIT, FASTA, and TFASTA in the Wisconsin Genetics Software Package, Genetics Computer Group, 575 Science Dr., Madison, WI), or by manual alignment and visual inspection (see, e.g., Brent et al., (2003) Current Protocols in Molecular Biology).

[0659] Two examples of algorithms that are suitable for determining percent sequence identity and sequence similarity are the BLAST and BLAST 2.0 algorithms, which are described in Altschul et al., (1977) Nuc. Acids Res. 25:3389-3402; and Altschul et al., (1990) J. Mol. Biol. 215:403-410, respectively. Software for performing BLAST analyses is publicly available through the National Center for Biotechnology Information.

[0660] The percent identity between two amino acid sequences can also be determined using the algorithm of E. Meyers and W. Miller, (1988) Comput. Appl. Biosci. 4:11-17) which has been incorporated into the ALIGN program (version 2.0), using a PAM120 weight residue table, a gap length penalty of 12 and a gap penalty of 4. In addition, the percent identity between two amino acid sequences can be determined using the Needleman and Wunsch (1970) J. Mol. Biol. 48:444-453) algorithm which has been incorporated into the GAP program in the GCG software package (available at www.gcg.com), using either a Blossom 62 matrix or a PAM250 matrix, and a gap weight of 16, 14, 12, 10, 8, 6, or 4 and a length weight of 1, 2, 3, 4, 5, or 6.

[0661] In one aspect, the present invention contemplates modifications of the starting antibody or fragment (e.g., scFv) amino acid sequence that generate functionally equivalent molecules. For example, the VH or VL of a binding domain (e.g., an antigen-binding domain that binds one or more of CD10, CD19, CD20, CD22, CD34, CD123, FLT-3, ROR1, CD79b, CD179b, or CD79a), e.g., scFv, comprised in the CAR can be modified to retain at least about 70%, 71%. 72%. 73%, 74%, 75%, 76%, 77%, 78%, 79%, 80%, 81%, 82%, 83%, 84%, 85%, 86%, 87%, 88%, 89%, 90%, 91%, 92%, 93%, 94%, 95%, 96%, 97%, 98%, 99% identity of the starting VH or VL framework region of the anti-CD19 binding domain, e.g., scFv. More broadly, the VH or VL of a B-cell antigen binding domain, to CD10, CD20, CD22, CD34, CD123, FLT-3, or ROR1, e.g., scFv, comprised in the CAR can be modified to retain at least about 70%, 71%. 72%. 73%, 74%, 75%, 76%, 77%, 78%, 79%, 80%, 81%, 82%, 83%, 84%, 85%, 86%, 87%, 88%, 89%, 90%, 91%, 92%, 93%, 94%, 95%, 96%, 97%, 98%, 99% identity of the starting VH or VL framework region of the antigen binding domain, e.g., scFv. The present invention contemplates modifications of the entire CAR construct, e.g., modifications in one or more amino acid sequences of the various domains of the CAR construct in order to generate functionally equivalent molecules. The CAR construct can be modified to retain at least about 70%, 71%. 72%. 73%, 74%, 75%, 76%, 77%, 78%, 79%, 80%, 81%, 82%, 83%, 84%, 85%, 86%, 87%, 88%, 89%, 90%, 91%, 92%, 93%, 94%, 95%, 96%, 97%, 98%, 99% identity of the starting CAR construct.

[0662] Bispecific CARs

[0663] In an embodiment a multispecific antibody molecule is a bispecific antibody molecule. A bispecific antibody has specificity for no more than two antigens. A bispecific antibody molecule is characterized by a first immunoglobulin variable domain sequence which has binding specificity for a first epitope and a second immunoglobulin variable domain sequence that has binding specificity for a second epitope. In an embodiment the first and second epitopes are on the same antigen, e.g., the same protein (or subunit of a multimeric protein). In an embodiment the first and second epitopes overlap. In an embodiment the first and second epitopes do not overlap. In an embodiment the first and second epitopes are on different antigens, e.g., different proteins (or different subunits of a multimeric protein). In an embodiment a bispecific antibody molecule comprises a heavy chain variable domain sequence and a light chain variable domain sequence which have binding specificity for a first epitope and a heavy chain variable domain sequence and a light chain variable domain sequence which have binding specificity for a second epitope. In an embodiment a bispecific antibody molecule comprises a half antibody having binding specificity for a first epitope and a half antibody having binding specificity for a second epitope. In an embodiment a bispecific antibody molecule comprises a half antibody, or fragment thereof, having binding specificity for a first epitope and a half antibody, or fragment thereof, having binding specificity for a second epitope. In an embodiment a bispecific antibody molecule comprises a scFv, or fragment thereof, have binding specificity for a first epitope and a scFv, or fragment thereof, have binding specificity for a second epitope. In an embodiment the first epitope is located on CD19 and the second epitope is located on CD10, CD20, CD22, CD34, CD123, FLT-3, or ROR1.

[0664] In certain embodiments, the antibody molecule is a multi-specific (e.g., a bispecific or a trispecific) antibody molecule. Protocols for generating bispecific or heterodimeric antibody molecules are known in the art; including but not limited to, for example, the “knob in a hole” approach described in, e.g., U.S. Pat. No. 5,731,168; the electrostatic steering Fc pairing as described in, e.g., WO 09/089004, WO 06/106905 and WO 2010/129304; Strand Exchange Engineered Domains (SEED) heterodimer formation as described in, e.g., WO 07/110205; Fab arm exchange as described in, e.g., WO 08/119353, WO 2011/131746, and WO 2013/060867; double antibody conjugate, e.g., by antibody cross-linking to generate a bi-specific structure using a heterobifunctional reagent having an amine-reactive group and a sulfhydryl reactive group as described in, e.g., U.S. Pat. No. 4,433,059; bispecific antibody determinants generated by recombining half antibodies (heavy-light chain pairs or Fabs) from different antibodies through cycle of reduction and oxidation of disulfide bonds between the two heavy chains, as described in, e.g., U.S. Pat. No. 4,444,878; trifunctional antibodies, e.g., three Fab′ fragments cross-linked through sulfhydryl reactive groups, as described in, e.g., U.S. Pat. No. 5,273,743; biosynthetic binding proteins, e.g., pair of scFvs cross-linked through C-terminal tails preferably through disulfide or amine-reactive chemical cross-linking, as described in, e.g., U.S. Pat. No. 5,534,254; bifunctional antibodies, e.g., Fab fragments with different binding specificities dimerized through leucine zippers (e.g., c-fos and c-jun) that have replaced the constant domain, as described in, e.g., U.S. Pat. No. 5,582,996; bispecific and oligospecific mono- and oligovalent receptors, e.g., VH-CH1 regions of two antibodies (two Fab fragments) linked through a polypeptide spacer between the CH1 region of one antibody and the VH region of the other antibody typically with associated light chains, as described in, e.g., U.S. Pat. No. 5,591,828; bispecific DNA-antibody conjugates, e.g., crosslinking of antibodies or Fab fragments through a double stranded piece of DNA, as described in, e.g., U.S. Pat. No. 5,635,602; bispecific fusion proteins, e.g., an expression construct containing two scFvs with a hydrophilic helical peptide linker between them and a full constant region, as described in, e.g., U.S. Pat. No. 5,637,481; multivalent and multispecific binding proteins, e.g., dimer of polypeptides having first domain with binding region of Ig heavy chain variable region, and second domain with binding region of Ig light chain variable region, generally termed diabodies (higher order structures are also encompassed creating for bispecific, trispecific, or tetraspecific molecules, as described in, e.g., U.S. Pat. No. 5,837,242; minibody constructs with linked VL and VH chains further connected with peptide spacers to an antibody hinge region and CH3 region, which can be dimerized to form bispecific/multivalent molecules, as described in, e.g., U.S. Pat. No. 5,837,821; VH and VL domains linked with a short peptide linker (e.g., 5 or 10 amino acids) or no linker at all in either orientation, which can form dimers to form bispecific diabodies; trimers and tetramers, as described in, e.g., U.S. Pat. No. 5,844,094; String of VH domains (or VL domains in family members) connected by peptide linkages with crosslinkable groups at the C-terminus further associated with VL domains to form a series of FVs (or scFvs), as described in, e.g., U.S. Pat. No. 5,864,019; and single chain binding polypeptides with both a VH and a VL domain linked through a peptide linker are combined into multivalent structures through non-covalent or chemical crosslinking to form, e.g., homobivalent, heterobivalent, trivalent, and tetravalent structures using both scFV or diabody type format, as described in, e.g., U.S. Pat. No. 5,869,620. Additional exemplary multispecific and bispecific molecules and methods of making the same are found, for example, in U.S. Pat. Nos. 5,910,573, 5,932,448, 5,959,083, 5,989,830, 6,005,079, 6,239,259, 6,294,353, 6,333,396, 6,476,198, 6,511,663, 6,670,453, 6,743,896, 6,809,185, 6,833,441, 7,129,330, 7,183,076, 7,521,056, 7,527,787, 7,534,866, 7,612,181, US2002004587A1, US2002076406A1, US2002103345A1, US2003207346A1, US2003211078A1, US2004219643A1, US2004220388A1, US2004242847A1, US2005003403A1, US2005004352A1, US2005069552A1, US2005079170A1, US2005100543A1, US2005136049A1, US2005136051A1, US2005163782A1, US2005266425A1, US2006083747A1, US2006120960A1, US2006204493A1, US2006263367A1, US2007004909A1, US2007087381A1, US2007128150A1, US2007141049A1, US2007154901A1, US2007274985A1, US2008050370A1, US2008069820A1, US2008152645A1, US2008171855A1, US2008241884A1, US2008254512A1, US2008260738A1, US2009130106A1, US2009148905A1, US2009155275A1, US2009162359A1, US2009162360A1, US2009175851A1, US2009175867A1, US2009232811A1, US2009234105A1, US2009263392A1, US2009274649A1, EP346087A2, WO0006605A2, WO02072635A2, WO04081051A1, WO06020258A2, WO2007044887A2, WO2007095338A2, WO2007137760A2, WO2008119353A1, WO2009021754A2, WO2009068630A1, WO9103493A1, WO9323537A1, WO9409131A1, WO9412625A2, WO9509917A1, WO9637621A2, WO9964460A1. The contents of the above-referenced applications are incorporated herein by reference in their entireties.

[0665] Within each antibody or antibody fragment (e.g., scFv) of a bispecific antibody molecule, the VH can be upstream or downstream of the VL. In some embodiments, the upstream antibody or antibody fragment (e.g., scFv) is arranged with its VH (VH₁) upstream of its VL (VL₁) and the downstream antibody or antibody fragment (e.g., scFv) is arranged with its VL (VL₂) upstream of its VH (VH₂), such that the overall bispecific antibody molecule has the arrangement VH₁-VL₁-VL₂-VH₂. In other embodiments, the upstream antibody or antibody fragment (e.g., scFv) is arranged with its VL (VL₁) upstream of its VH (VH₁) and the downstream antibody or antibody fragment (e.g., scFv) is arranged with its VH (VH₂) upstream of its VL (VL₂), such that the overall bispecific antibody molecule has the arrangement VL₁-VH₁-VH₂-VL₂. Optionally, a linker is disposed between the two antibodies or antibody fragments (e.g., scFvs), e.g., between VL₁ and VL₂ if the construct is arranged as VH₁-VL₁-VL₂-VH₂, or between VH₁ and VH₂ if the construct is arranged as VL₁-VH₁-VH₂-VL₂. The linker may be a linker as described herein, e.g., a (Gly₄-Ser)n linker, wherein n is 1, 2, 3, 4, 5, or 6, e.g., 4 (SEQ ID NO: 53). In general, the linker between the two scFvs should be long enough to avoid mispairing between the domains of the two scFvs. Optionally, a linker is disposed between the VL and VH of the first scFv. Optionally, a linker is disposed between the VL and VH of the second scFv. In constructs that have multiple linkers, any two or more of the linkers can be the same or different. Accordingly, in some embodiments, a bispecific CAR comprises VLs, VHs, and optionally one or more linkers in an arrangement as described herein.

[0666] In certain embodiments the antibody molecule is a bispecific antibody molecule having a first binding specificity for a first B-cell epitope and a second binding specificity for another B-cell antigen. For instance, in some embodiments the bispecific antibody molecule has a first binding specificity for CD19 and a second binding specificity for one or more of CD10, CD20, CD22, CD34, CD123, FLT-3, ROR1, CD79b, CD179b, or CD79a. In some embodiments the bispecific antibody molecule has a first binding specificity for CD19 and a second binding specificity for CD22.

### Chimeric TCR

[0667] In one aspect, the antibodies and antibody fragments disclosed herein (e.g., those directed against CD10, CD19, CD20, CD22, CD34, CD123, FLT-3, ROR1, CD79b, CD179b, or CD79a) can be grafted to one or more constant domain of a T cell receptor (“TCR”) chain, for example, a TCR alpha or TCR beta chain, to create an chimeric TCR that binds specifically to a cancer associated antigen. Without being bound by theory, it is believed that chimeric TCRs will signal through the TCR complex upon antigen binding. For example, an scFv as disclosed herein, can be grafted to the constant domain, e.g., at least a portion of the extracellular constant domain, the transmembrane domain and the cytoplasmic domain, of a TCR chain, for example, the TCR alpha chain and/or the TCR beta chain. As another example, an antibody fragment, for example a VL domain as described herein, can be grafted to the constant domain of a TCR alpha chain, and an antibody fragment, for example a VH domain as described herein, can be grafted to the constant domain of a TCR beta chain (or alternatively, a VL domain may be grafted to the constant domain of the TCR beta chain and a VH domain may be grafted to a TCR alpha chain). As another example, the CDRs of an antibody or antibody fragment, e.g., the CDRs of an antibody or antibody fragment as described in any of the Tables herein may be grafted into a TCR alpha and/or beta chain to create a chimeric TCR that binds specifically to a cancer associated antigen. For example, the LC CDRs disclosed herein may be grafted into the variable domain of a TCR alpha chain and the HC CDRs disclosed herein may be grafted to the variable domain of a TCR beta chain, or vice versa. Such chimeric TCRs may be produced by any appropriate method (For example, Willemsen R A et al, Gene Therapy 2000; 7: 1369-1377; Zhang T et al, Cancer Gene Ther 2004; 11: 487-496; Aggen et al, Gene Ther. 2012 April; 19(4):365-74).

### Non-Antibody Scaffolds

[0668] In embodiments, the antigen binding domain comprises a non antibody scaffold, e.g., a fibronectin, ankyrin, domain antibody, lipocalin, small modular immuno-pharmaceutical, maxybody, Protein A, or affilin. The non antibody scaffold has the ability to bind to target antigen on a cell. In embodiments, the antigen binding domain is a polypeptide or fragment thereof of a naturally occurring protein expressed on a cell. In some embodiments, the antigen binding domain comprises a non-antibody scaffold. A wide variety of non-antibody scaffolds can be employed so long as the resulting polypeptide includes at least one binding region which specifically binds to the target antigen on a target cell.

[0669] Non-antibody scaffolds include: fibronectin (Novartis, MA), ankyrin (Molecular Partners AG, Zurich, Switzerland), domain antibodies (Domantis, Ltd., Cambridge, MA, and Ablynx nv, Zwijnaarde, Belgium), lipocalin (Pieris Proteolab AG, Freising, Germany), small modular immuno-pharmaceuticals (Trubion Pharmaceuticals Inc., Seattle, WA), maxybodies (Avidia, Inc., Mountain View, CA), Protein A (Affibody AG, Sweden), and affilin (gamma-crystallin or ubiquitin) (Scil Proteins GmbH, Halle, Germany).

[0670] Fibronectin scaffolds can be based on fibronectin type III domain (e.g., the tenth module of the fibronectin type III (¹⁰Fn3 domain)). The fibronectin type III domain has 7 or 8 beta strands which are distributed between two beta sheets, which themselves pack against each other to form the core of the protein, and further containing loops (analogous to CDRs) which connect the beta strands to each other and are solvent exposed. There are at least three such loops at each edge of the beta sheet sandwich, where the edge is the boundary of the protein perpendicular to the direction of the beta strands (see U.S. Pat. No. 6,818,418). Because of this structure, this non-antibody scaffold mimics antigen binding properties that are similar in nature and affinity to those of antibodies. These scaffolds can be used in a loop randomization and shuffling strategy in vitro that is similar to the process of affinity maturation of antibodies in vivo.

[0671] The ankyrin technology is based on using proteins with ankyrin derived repeat modules as scaffolds for bearing variable regions which can be used for binding to different targets. The ankyrin repeat module is a 33 amino acid polypeptide consisting of two anti-parallel α-helices and a β-turn. Binding of the variable regions is mostly optimized by using ribosome display.

[0672] Avimers are derived from natural A-domain containing protein such as HER3. These domains are used by nature for protein-protein interactions and in human over 250 proteins are structurally based on A-domains. Avimers consist of a number of different “A-domain” monomers (2-10) linked via amino acid linkers. Avimers can be created that can bind to the target antigen using the methodology described in, for example, U.S. Patent Application Publication Nos. 20040175756; 20050053973; 20050048512; and 20060008844.

[0673] Affibody affinity ligands are small, simple proteins composed of a three-helix bundle based on the scaffold of one of the IgG-binding domains of Protein A. Protein A is a surface protein from the bacterium Staphylococcus aureus. This scaffold domain consists of 58 amino acids, 13 of which are randomized to generate affibody libraries with a large number of ligand variants (See e.g., U.S. Pat. No. 5,831,012). Affibody molecules mimic antibodies, they have a molecular weight of 6 kDa, compared to the molecular weight of antibodies, which is 150 kDa. In spite of its small size, the binding site of affibody molecules is similar to that of an antibody.

[0674] Protein epitope mimetics (PEM) are medium-sized, cyclic, peptide-like molecules (MW 1-2 kDa) mimicking beta-hairpin secondary structures of proteins, the major secondary structure involved in protein-protein interactions. Antigen binding domains, e.g., those comprising scFv, single domain antibodies, or camelid antibodies, can be directed to any target receptor/ligand described herein, e.g., the PD1 receptors, PD-L1 or PD-L2.

[0675] In an embodiment the antigen binding domain comprises the extracellular domain, or a counter-ligand binding fragment thereof, of molecule that binds a counterligand on the surface of a target cell.

[0676] An antigen binding domain can comprise the extracellular domain of an inhibitory receptor. Engagement with a counterligand of the coinhibitory molecule is redirected into an optimization of immune effector response.

[0677] An antigen binding domain can comprise the extracellular domain of a costimulatory molecule, referred to as a Costimulatory ECD domain, Engagement with a counter ligand of the costimulatory molecule results in optimization of immune effector response.

[0678] Transmembrane Domain

[0679] With respect to the transmembrane domain, in various embodiments, a CAR can be designed to comprise a transmembrane domain that is attached to the extracellular domain of the CAR. A transmembrane domain can include one or more additional amino acids adjacent to the transmembrane region, e.g., one or more amino acid associated with the extracellular region of the protein from which the transmembrane was derived (e.g., 1, 2, 3, 4, 5, 6, 7, 8, 9, 10 up to amino acids of the extracellular region) and/or one or more additional amino acids associated with the intracellular region of the protein from which the transmembrane protein is derived (e.g., 1, 2, 3, 4, 5, 6, 7, 8, 9, 10 up to 15 amino acids of the intracellular region). In one aspect, the transmembrane domain is one that is associated with one of the other domains of the CAR, e.g., in one embodiment, the transmembrane domain may be from the same protein that the signaling domain, costimulatory domain or the hinge domain is derived from. In another aspect, the transmembrane domain is not derived from the same protein that any other domain of the CAR is derived from. In some instances, the transmembrane domain can be selected or modified by amino acid substitution to avoid binding of such domains to the transmembrane domains of the same or different surface membrane proteins, e.g., to minimize interactions with other members of the receptor complex. In one aspect, the transmembrane domain is capable of homodimerization with another CAR on the cell surface of a CAR-expressing cell. In a different aspect the amino acid sequence of the transmembrane domain may be modified or substituted so as to minimize interactions with the binding domains of the native binding partner present in the same CAR-expressing cell.

[0680] The transmembrane domain may be derived either from a natural or from a recombinant source. Where the source is natural, the domain may be derived from any membrane-bound or transmembrane protein. In one aspect the transmembrane domain is capable of signaling to the intracellular domain(s) whenever the CAR has bound to a target. A transmembrane domain of particular use in this invention may include at least the transmembrane region(s) of e.g., the alpha, beta or zeta chain of the T-cell receptor, CD28, CD3 epsilon, CD45, CD4, CD5, CD8, CD9, CD16, CD22, CD33, CD37, CD64, CD80, CD86, CD134, CD137, CD154. In some embodiments, a transmembrane domain may include at least the transmembrane region(s) of, e.g., KIRDS2, OX40, CD2, CD27, LFA-1 (CD11a, CD18), ICOS (CD278), 4-1BB (CD137), GITR, CD40, BAFFR, HVEM (LIGHTR), SLAMF7, NKp80 (KLRF1), NKp44, NKp30, NKp46, CD160, CD19, IL2R beta, IL2R gamma, IL7R α, ITGA1, VLA1, CD49a, ITGA4, IA4, CD49D, ITGA6, VLA-6, CD49f, ITGAD, CD11d, ITGAE, CD103, ITGAL, CD11a, LFA-1, ITGAM, CD11b, ITGAX, CD11c, ITGB1, CD29, ITGB2, CD18, LFA-1, ITGB7, TNFR2, DNAM1 (CD226), SLAMF4 (CD244, 2B4), CD84, CD96 (Tactile), CEACAM1, CRTAM, Ly9 (CD229), CD160 (BY55), PSGL1, CD100 (SEMA4D), SLAMF6 (NTB-A, Ly108), SLAM (SLAMF1, CD150, IPO-3), BLAME (SLAMF8), SELPLG (CD162), LTBR, PAG/Cbp, NKG2D, NKG2C, or CD19.

[0681] In some instances, the transmembrane domain can be attached to the extracellular region of the CAR, e.g., the antigen binding domain of the CAR, via a hinge, e.g., a hinge from a human protein. For example, in one embodiment, the hinge can be a human Ig (immunoglobulin) hinge, e.g., an IgG4 hinge, an IgD hinge, a GS linker (e.g., a GS linker described herein), a KIR2DS2 hinge, or a CD8a hinge. In one embodiment, the hinge or spacer comprises (e.g., consists of) the amino acid sequence of SEQ ID NO:14. In one aspect, the transmembrane domain comprises (e.g., consists of) a transmembrane domain of SEQ ID NO: 15.

[0682] In one aspect, the hinge or spacer comprises an IgG4 hinge. For example, in one embodiment, the hinge or spacer comprises a hinge of the amino acid sequence

(SEQ ID NO: 45)
ESKYGPPCPPCPAPEFLGGPSVFLFPPKPKDTLMISRTPEVTCVVVDVSQ
EDPEVQFNWYVDGVEVHNAKTKPREEQFNSTYRVVSVLTVLHQDWLNGKE
YKCKVSNKGLPSSIEKTISKAKGQPREPQVYTLPPSQEEMTKNQVSLTCL
VKGFYPSDIAVEWESNGQPENNYKTTPPVLDSDGSFFLYSRLTVDKSRWQ
EGNVFSCSVMHEALHNHYTQKSLSLSLGKM.

In some embodiments, the hinge or spacer comprises a hinge encoded by a nucleotide sequence of

(SEQ ID NO: 46)
GAGAGCAAGTACGGCCCTCCCTGCCCCCCTTGCCCTGCCCCCGAGTTCCT
GGGCGGACCCAGCGTGTTCCTGTTCCCCCCCAAGCCCAAGGACACCCTGA
TGATCAGCCGGACCCCCGAGGTGACCTGTGTGGTGGTGGACGTGTCCCAG
GAGGACCCCGAGGTCCAGTTCAACTGGTACGTGGACGGCGTGGAGGTGCA
CAACGCCAAGACCAAGCCCCGGGAGGAGCAGTTCAATAGCACCTACCGGG
TGGTGTCCGTGCTGACCGTGCTGCACCAGGACTGGCTGAACGGCAAGGAA
TACAAGTGTAAGGTGTCCAACAAGGGCCTGCCCAGCAGCATCGAGAAAAC
CATCAGCAAGGCCAAGGGCCAGCCTCGGGAGCCCCAGGTGTACACCCTGC
CCCCTAGCCAAGAGGAGATGACCAAGAACCAGGTGTCCCTGACCTGCCTG
GTGAAGGGCTTCTACCCCAGCGACATCGCCGTGGAGTGGGAGAGCAACGG
CCAGCCCGAGAACAACTACAAGACCACCCCCCCTGTGCTGGACAGCGACG
GCAGCTTCTTCCTGTACAGCCGGCTGACCGTGGACAAGAGCCGGTGGCAG
GAGGGCAACGTCTTTAGCTGCTCCGTGATGCACGAGGCCCTGCACAACCA
CTACACCCAGAAGAGCCTGAGCCTGTCCCTGGGCAAGATG.

[0683] In one aspect, the hinge or spacer comprises an IgD hinge. For example, in one embodiment, the hinge or spacer comprises a hinge of the amino acid sequence

(SEQ ID NO: 47)
RWPESPKAQASSVPTAQPQAEGSLAKATTAPATTRNTGRGGEEKKKEKEK
EEQEERETKTPECPSHTQPLGVYLLTPAVQDLWLRDKATFTCFVVGSDLK
DAHLTWEVAGKVPTGGVEEGLLERHSNGSQSQHSRLTLPRSLWNAGTSVT
CTLNHPSLPPQRLMALREPAAQAPVKLSLNLLASSDPPEAASWLLCEVSG
FSPPNILLMWLEDQREVNTSGFAPARPPPQPGSTTFWAWSVLRVPAPPSP
QPATYTCVVSHEDSRTLLNASRSLEVSYVTDH.

In some embodiments, the hinge or spacer comprises a hinge encoded by a nucleotide sequence of

(SEQ ID NO: 48)
AGGTGGCCCGAAAGTCCCAAGGCCCAGGCATCTAGTGTTCCTACTGCACA
GCCCCAGGCAGAAGGCAGCCTAGCCAAAGCTACTACTGCACCTGCCACTA
CGCGCAATACTGGCCGTGGCGGGGAGGAGAAGAAAAAGGAGAAAGAGAAA
GAAGAACAGGAAGAGAGGGAGACCAAGACCCCTGAATGTCCATCCCATAC
CCAGCCGCTGGGCGTCTATCTCTTGACTCCCGCAGTACAGGACTTGTGGC
TTAGAGATAAGGCCACCTTTACATGTTTCGTCGTGGGCTCTGACCTGAAG
GATGCCCATTTGACTTGGGAGGTTGCCGGAAAGGTACCCACAGGGGGGGT
TGAGGAAGGGTTGCTGGAGCGCCATTCCAATGGCTCTCAGAGCCAGCACT
CAAGACTCACCCTTCCGAGATCCCTGTGGAACGCCGGGACCTCTGTCACA
TGTACTCTAAATCATCCTAGCCTGCCCCCACAGCGTCTGATGGCCCTTAG
AGAGCCAGCCGCCCAGGCACCAGTTAAGCTTAGCCTGAATCTGCTCGCCA
GTAGTGATCCCCCAGAGGCCGCCAGCTGGCTCTTATGCGAAGTGTCCGGC
TTTAGCCCGCCCAACATCTTGCTCATGTGGCTGGAGGACCAGCGAGAAGT
GAACACCAGCGGCTTCGCTCCAGCCCGGCCCCCACCCCAGCCGGGTTCTA
CCACATTCTGGGCCTGGAGTGTCTTAAGGGTCCCAGCACCACCTAGCCCC
CAGCCAGCCACATACACCTGTGTTGTGTCCCATGAAGATAGCAGGACCCT
GCTAAATGCTTCTAGGAGTCTGGAGGTTTCCTACGTGACTGACCATT.

[0684] In one aspect, the transmembrane domain may be recombinant, in which case it will comprise predominantly hydrophobic residues such as leucine and valine. In one aspect a triplet of phenylalanine, tryptophan and valine can be found at each end of a recombinant transmembrane domain.

[0685] Optionally, a short oligo- or polypeptide linker, between 2 and 10 amino acids in length may form the linkage between the transmembrane domain and the cytoplasmic region of the CAR. A glycine-serine doublet provides a particularly suitable linker. For example, in one aspect, the linker comprises the amino acid sequence of GGGGSGGGGS (SEQ ID NO:49). In some embodiments, the linker is encoded by a nucleotide sequence of

(SEQ ID NO: 50)
GGTGGCGGAGGTTCTGGAGGTGGAGGTTCC.

[0686] In one aspect, the hinge or spacer comprises a KIR2DS2 hinge.

[0687] Cytoplasmic Domain

[0688] The cytoplasmic domain or region of the CAR includes an intracellular signaling domain. An intracellular signaling domain is generally responsible for activation of at least one of the normal effector functions of the immune cell in which the CAR has been introduced.

[0689] Examples of intracellular signaling domains for use in the CAR of the invention include the cytoplasmic sequences of the T cell receptor (TCR) and co-receptors that act in concert to initiate signal transduction following antigen receptor engagement, as well as any derivative or variant of these sequences and any recombinant sequence that has the same functional capability.

[0690] It is known that signals generated through the TCR alone are insufficient for full activation of the T cell and that a secondary and/or costimulatory signal is also required. Thus, T cell activation can be said to be mediated by two distinct classes of cytoplasmic signaling sequences: those that initiate antigen-dependent primary activation through the TCR (primary intracellular signaling domains) and those that act in an antigen-independent manner to provide a secondary or costimulatory signal (secondary cytoplasmic domain, e.g., a costimulatory domain).

[0691] A primary signaling domain regulates primary activation of the TCR complex either in a stimulatory way, or in an inhibitory way. Primary intracellular signaling domains that act in a stimulatory manner may contain signaling motifs which are known as immunoreceptor tyrosine-based activation motifs or ITAMs.

[0692] Examples of ITAM containing primary intracellular signaling domains that are of particular use in the invention include those of CD3 zeta, common FcR gamma (FCER1G), Fc gamma RIIa, FcR beta (Fc Epsilon Rib), CD3 gamma, CD3 delta, CD3 epsilon, CD79a, CD79b, CD278 (also known as “ICOS”), FcεRI, DAP10, DAP12, and CD66d. In one embodiment, a CAR of the invention comprises an intracellular signaling domain, e.g., a primary signaling domain of CD3-zeta.

[0693] In one embodiment, a primary signaling domain comprises a modified ITAM domain, e.g., a mutated ITAM domain which has altered (e.g., increased or decreased) activity as compared to the native ITAM domain. In one embodiment, a primary signaling domain comprises a modified ITAM-containing primary intracellular signaling domain, e.g., an optimized and/or truncated ITAM-containing primary intracellular signaling domain. In an embodiment, a primary signaling domain comprises one, two, three, four or more ITAM motifs.

[0694] Further examples of molecules containing a primary intracellular signaling domain that are of particular use in the invention include those of DAP10, DAP12, and CD32.

### Costimulatory Signaling Domain

[0695] The intracellular signalling domain of the CAR can comprise the CD3-zeta signaling domain by itself or it can be combined with any other desired intracellular signaling domain(s) useful in the context of a CAR of the invention. For example, the intracellular signaling domain of the CAR can comprise a CD3 zeta chain portion and a costimulatory signaling domain. The costimulatory signaling domain refers to a portion of the CAR comprising the intracellular domain of a costimulatory molecule. In one embodiment, the intracellular domain is designed to comprise the signaling domain of CD3-zeta and the signaling domain of CD28. In one aspect, the intracellular domain is designed to comprise the signaling domain of CD3-zeta and the signaling domain of ICOS.

[0696] A costimulatory molecule can be a cell surface molecule other than an antigen receptor or its ligands that is required for an efficient response of lymphocytes to an antigen. Examples of such molecules include CD27, CD28, 4-1BB (CD137), OX40, CD30, CD40, PD1, ICOS, lymphocyte function-associated antigen-1 (LFA-1), CD2, CD7, LIGHT, NKG2C, B7-H3, and a ligand that specifically binds with CD83, and the like. For example, CD27 costimulation has been demonstrated to enhance expansion, effector function, and survival of human CART cells in vitro and augments human T cell persistence and antitumor activity in vivo (Song et al. Blood. 2012; 119(3):696-706). Further examples of such costimulatory molecules include MHC class I molecule, TNF receptor proteins, Immunoglobulin-like proteins, cytokine receptors, integrins, signaling lymphocytic activation molecules (SLAM proteins), activating NK cell receptors, BTLA, a Toll ligand receptor, OX40, CD2, CD7, CD27, CD28, CD30, CD40, ICAM-1, LFA-1 (CD11a/CD18), 4-1BB (CD137), B7-H3, ICAM-1, ICOS (CD278), GITR, BAFFR, LIGHT, HVEM (LIGHTR), KIRDS2, SLAMF7, NKp80 (KLRF1), NKp44, NKp30, NKp46, CD19, CD4, CD8alpha, CD8beta, IL2R beta, IL2R gamma, IL7R alpha, ITGA4, VLA1, CD49a, ITGA4, IA4, CD49D, ITGA6, VLA-6, CD49f, ITGAD, CD11d, ITGAE, CD103, ITGAL, CD11a, LFA-1, ITGAM, CD11b, ITGAX, CD11c, ITGB1, CD29, ITGB2, CD18, LFA-1, ITGB7, NKG2D, NKG2C, TNFR2, TRANCE/RANKL, DNAM1 (CD226), SLAMF4 (CD244, 2B4), CD84, CD96 (Tactile), CEACAM1, CRTAM, Ly9 (CD229), CD160 (BY55), PSGL1, CD100 (SEMA4D), CD69, SLAMF6 (NTB-A, Ly108), SLAM (SLAMF1, CD150, IPO-3), BLAME (SLAMF8), SELPLG (CD162), LTBR, LAT, GADS, SLP-76, PAG/Cbp, CD19a, and a ligand that specifically binds with CD83.

[0697] The intracellular signaling sequences within the cytoplasmic portion of the CAR of the invention may be linked to each other in a random or specified order. Optionally, a short oligo- or polypeptide linker, for example, between 2 and 10 amino acids (e.g., 2, 3, 4, 5, 6, 7, 8, 9, or amino acids) in length may form the linkage between intracellular signaling sequence. In one embodiment, a glycine-serine doublet can be used as a suitable linker. In one embodiment, a single amino acid, e.g., an alanine, a glycine, can be used as a suitable linker.

[0698] In one aspect, the intracellular signaling domain is designed to comprise two or more, e.g., 2, 3, 4, 5, or more, costimulatory signaling domains. In an embodiment, the two or more, e.g., 2, 3, 4, 5, or more, costimulatory signaling domains, are separated by a linker molecule, e.g., a linker molecule described herein. In one embodiment, the intracellular signaling domain comprises two costimulatory signaling domains. In some embodiments, the linker molecule is a glycine residue. In some embodiments, the linker is an alanine residue.

[0699] In one aspect, the intracellular signaling domain is designed to comprise the signaling domain of CD3-zeta and the signaling domain of CD28. In one aspect, the intracellular signaling domain is designed to comprise the signaling domain of CD3-zeta and the signaling domain of 4-1BB. In one aspect, the signaling domain of 4-1BB is a signaling domain of SEQ ID NO: 16. In one aspect, the signaling domain of CD3-zeta is a signaling domain of SEQ ID NO: 17.

[0700] In one aspect, the intracellular signaling domain is designed to comprise the signaling domain of CD3-zeta and the signaling domain of CD27. In one aspect, the signaling domain of CD27 comprises an amino acid sequence of

(SEQ ID NO: 51)
QRRKYRSNKGESPVEPAEPCRYSCPREEEGSTIPIQEDYRKPEPACSP.

In one aspect, the signalling domain of CD27 is encoded by a nucleic acid sequence of

(SEQ ID NO: 52)
AGGAGTAAGAGGAGCAGGCTCCTGCACAGTGACTACATGAACATGACTCC
CCGCCGCCCCGGGCCCACCCGCAAGCATTACCAGCCCTATGCCCCACCAC
GCGACTTCGCAGCCTATCGCTCC.

### Natural Killer Cell Receptor (NKR) CARs

[0701] In an embodiment, a CAR molecule described herein comprises one or more components of a natural killer cell receptor (NKR), thereby forming an NKR-CAR. The NKR component can be a transmembrane domain, a hinge domain, or a cytoplasmic domain from any of the following natural killer cell receptors: killer cell immunoglobulin-like receptor (KIR), e.g., KIR2DL1, KIR2DL2/L3, KIR2DL4, KIR2DL5A, KIR2DL5B, KIR2DS1, KIR2DS2, KIR2DS3, KIR2DS4, DIR2DS5, KIR3DL1/S1, KIR3DL2, KIR3DL3, KIR2DP1, and KIR3DP1; natural cytotoxicity receptor (NCR), e.g., NKp30, NKp44, NKp46; signaling lymphocyte activation molecule (SLAM) family of immune cell receptors, e.g., CD48, CD229, 2B4, CD84, NTB-A, CRACC, BLAME, and CD2F-10; Fc receptor (FcR), e.g., CD16, and CD64; and Ly49 receptors, e.g., LY49A, LY49C. The NKR-CAR molecules described herein may interact with an adaptor molecule or intracellular signaling domain, e.g., DAP12. Exemplary configurations and sequences of CAR molecules comprising NKR components are described in International Publication No. WO2014/145252, the contents of which are hereby incorporated by reference.

### Strategies for Regulating Chimeric Antigen Receptors

[0702] In some embodiments, a regulatable CAR (RCAR) where the CAR activity can be controlled is desirable to optimize the safety and efficacy of a CAR therapy. There are many ways CAR activities can be regulated. For example, inducing apoptosis using, e.g., a caspase fused to a dimerization domain (see, e.g., Di et al., N Engl. J. Med. 2011 Nov. 3; 365(18):1673-1683), can be used as a safety switch in the CAR therapy of the instant invention. In one embodiment, the cells (e.g., T cells or NK cells) expressing a CAR of the present invention further comprise an inducible apoptosis switch, wherein a human caspase (e.g., caspase 9) or a modified version is fused to a modification of the human FKB protein that allows conditional dimerization. In the presence of a small molecule, such as a rapalog (e.g., AP 1903, AP20187), the inducible caspase (e.g., caspase 9) is activated and leads to the rapid apoptosis and death of the cells (e.g., T cells or NK cells) expressing a CAR of the present invention. Examples of a caspase-based inducible apoptosis switch (or one or more aspects of such a switch) have been described in, e.g., US2004040047; US20110286980; US20140255360; WO1997031899; WO2014151960; WO2014164348; WO2014197638; WO2014197638; all of which are incorporated by reference herein.

[0703] In another example, CAR-expressing cells can also express an inducible Caspase-9 (iCaspase-9) molecule that, upon administration of a dimerizer drug (e.g., rimiducid (also called AP1903 (Bellicum Pharmaceuticals) or AP20187 (Ariad)) leads to activation of the Caspase-9 and apoptosis of the cells. The iCaspase-9 molecule contains a chemical inducer of dimerization (CID) binding domain that mediates dimerization in the presence of a CID. This results in inducible and selective depletion of CAR-expressing cells. In some cases, the iCaspase-9 molecule is encoded by a nucleic acid molecule separate from the CAR-encoding vector(s). In some cases, the iCaspase-9 molecule is encoded by the same nucleic acid molecule as the CAR-encoding vector. The iCaspase-9 can provide a safety switch to avoid any toxicity of CAR-expressing cells. See, e.g., Song et al. Cancer Gene Ther. 2008; 15(10):667-75; Clinical Trial Id. No. NCT02107963; and Di Stasi et al. N. Engl. J. Med. 2011; 365:1673-83.

[0704] Alternative strategies for regulating the CAR therapy of the instant invention include utilizing small molecules or antibodies that deactivate or turn off CAR activity, e.g., by deleting CAR-expressing cells, e.g., by inducing antibody dependent cell-mediated cytotoxicity (ADCC). For example, CAR-expressing cells described herein may also express an antigen that is recognized by molecules capable of inducing cell death, e.g., ADCC or complement-induced cell death. For example, CAR expressing cells described herein may also express a receptor capable of being targeted by an antibody or antibody fragment. Examples of such receptors include EpCAM, VEGFR, integrins (e.g., integrins avβ3, α4, αI¾β3, α4β7, α5β1, αvβ3, αv), members of the TNF receptor superfamily (e.g., TRAIL-R1, TRAIL-R2), PDGF Receptor, interferon receptor, folate receptor, GPNMB, ICAM-1, HLA-DR, CEA, CA-125, MUC1, TAG-72, IL-6 receptor, 5T4, GD2, GD3, CD2, CD3, CD4, CD5, CD11, CD11a/LFA-1, CD15, CD18/ITGB2, CD19, CD20, CD22, CD23/lgE Receptor, CD25, CD28, CD30, CD33, CD38, CD40, CD41, CD44, CD51, CD52, CD62L, CD74, CD80, CD125, CD147/basigin, CD152/CTLA-4, CD154/CD40L, CD195/CCR5, CD319/SLAMF7, and EGFR, and truncated versions thereof (e.g., versions preserving one or more extracellular epitopes but lacking one or more regions within the cytoplasmic domain).

[0705] For example, a CAR-expressing cell described herein may also express a truncated epidermal growth factor receptor (EGFR) which lacks signaling capacity but retains the epitope that is recognized by molecules capable of inducing ADCC, e.g., cetuximab (ERBITUX®), such that administration of cetuximab induces ADCC and subsequent depletion of the CAR-expressing cells (see, e.g., WO2011/056894, and Jonnalagadda et al., Gene Ther. 2013; 20(8)853-860). Another strategy includes expressing a highly compact marker/suicide gene that combines target epitopes from both CD32 and CD20 antigens in the CAR-expressing cells described herein, which binds rituximab, resulting in selective depletion of the CAR-expressing cells, e.g., by ADCC (see, e.g., Philip et al., Blood. 2014; 124(8)1277-1287). Other methods for depleting CAR-expressing cells described herein include administration of CAMPATH, a monoclonal anti-CD52 antibody that selectively binds and targets mature lymphocytes, e.g., CAR-expressing cells, for destruction, e.g., by inducing ADCC. In other embodiments, the CAR-expressing cell can be selectively targeted using a CAR ligand, e.g., an anti-idiotypic antibody. In some embodiments, the anti-idiotypic antibody can cause effector cell activity, e.g., ADCC or ADC activities, thereby reducing the number of CAR-expressing cells. In other embodiments, the CAR ligand, e.g., the anti-idiotypic antibody, can be coupled to an agent that induces cell killing, e.g., a toxin, thereby reducing the number of CAR-expressing cells. Alternatively, the CAR molecules themselves can be configured such that the activity can be regulated, e.g., turned on and off, as described below.

[0706] In other embodiments, a CAR-expressing cell described herein may also express a target protein recognized by the T cell depleting agent. In one embodiment, the target protein is CD20 and the T cell depleting agent is an anti-CD20 antibody, e.g., rituximab. In such embodiment, the T cell depleting agent is administered once it is desirable to reduce or eliminate the CAR-expressing cell, e.g., to mitigate the CAR induced toxicity. In other embodiments, the T cell depleting agent is an anti-CD52 antibody, e.g., alemtuzumab.

[0707] In an aspect, a RCAR comprises a set of polypeptides, typically two in the simplest embodiments, in which the components of a standard CAR described herein, e.g., an antigen binding domain and an intracellular signaling domain, are partitioned on separate polypeptides or members. In some embodiments, the set of polypeptides include a dimerization switch that, upon the presence of a dimerization molecule, can couple the polypeptides to one another, e.g., can couple an antigen binding domain to an intracellular signaling domain. In one embodiment, a CAR of the present invention utilizes a dimerization switch as those described in, e.g., WO2014127261, which is incorporated by reference herein. Additional description and exemplary configurations of such regulatable CARs are provided herein and in International Publication No. WO 2015/090229, hereby incorporated by reference in its entirety.

[0708] In some embodiments, an RCAR involves a switch domain, e.g., a FKBP switch domain, as set out SEQ ID NO: 122, or comprise a fragment of FKBP having the ability to bind with FRB, e.g., as set out in SEQ ID NO: 123. In some embodiments, the RCAR involves a switch domain comprising a FRB sequence, e.g., as set out in SEQ ID NO: 124, or a mutant FRB sequence, e.g., as set out in any of SEQ ID Nos. 125-130.

(SEQ ID NO: 122)
D V P D Y A S L G G P S S P K K K R K V S R G V Q
V E T I S P G D G R T F P K R G Q T C V V H Y T G
M L E D G K K F D S S R D R N K P F K F M L G K
Q E V I R G W E E G V A Q M S V G Q R A K L T I S
P D Y A Y G A T G H P G I I P P H A T L V F D V E
L L K L E T S Y
(SEQ ID NO: 123)
V Q V E T I S P G D G R T F P K R G Q T C V V H Y
T G M L E D G K K F D S S R D R N K P F K F M L
G K Q E V I R G W E E G V A Q M S V G Q R A K L
T I S P D Y A Y G A T G H P G I I P P H A T L V F
D V E L L K L E T S
(SEQ ID NO: 124)
[sequence omitted]

TABLE 1
Exemplary mutant FRB having increased
affinity for a dimerization molecule.

| | | SEQ |
|---|---|---|
| | | ID |
| FRB mutant | Amino Acid Sequence | NO: |
| E2032I mutant | ILWHEMWHEGLIEASRLYFGERNVKGMFEVLEPLHAMMERGPQTLKETSFNQAYGR | 125 |
| | DLMEAQEWCRKYMKSGNVKDLTQAWDLYYHVFRRISKTS | |
| E2032L mutant | ILWHEMWHEGLLEASRLYFGERNVKGMFEVLEPLHAMMERGPQTLKETSFNQAYGR | 126 |
| | DLMEAQEWCRKYMKSGNVKDLTQAWDLYYHVFRRISKTS | |
| T2098L mutant | ILWHEMWHEGLEEASRLYFGERNVKGMFEVLEPLHAMMERGPQTLKETSFNQAYGR | 127 |
| | DLMEAQEWCRKYMKSGNVKDLLQAWDLYYHVFRRISKTS | |
| E2032, T2098 | ILWHEMWHEGLXEASRLYFGERNVKGMFEVLEPLHAMMERGPQTLKETSFNQAYGR | 128 |
| mutant | DLMEAQEWCRKYMKSGNVKDLXQAWDLYYHVFRRISKTS | |
| E2032I, T2098L | ILWHEMWHEGLIEASRLYFGERNVKGMFEVLEPLHAMMERGPQTLKETSFNQAYGR | 129 |
| mutant | DLMEAQEWCRKYMKSGNVKDLLQAWDLYYHVFRRISKTS | |
| E2032L, T2098L | ILWHEMWHEGLLEASRLYFGERNVKGMFEVLEPLHAMMERGPQTLKETSFNQAYGR | 130 |
| mutant | DLMEAQEWCRKYMKSGNVKDLLQAWDLYYHVFRRISKTS | |

[0709] Split CAR

[0710] In some embodiments, the CAR-expressing cell uses a split CAR. The split CAR approach is described in more detail in publications WO2014/055442 and WO2014/055657. Briefly, a split CAR system comprises a cell expressing a first CAR having a first antigen binding domain and a costimulatory domain (e.g., 41BB), and the cell also expresses a second CAR having a second antigen binding domain and an intracellular signaling domain (e.g., CD3 zeta). When the cell encounters the first antigen, the costimulatory domain is activated, and the cell proliferates. When the cell encounters the second antigen, the intracellular signaling domain is activated and cell-killing activity begins. Thus, the CAR-expressing cell is only fully activated in the presence of both antigens.

[0711] RNA Transfection

[0712] Disclosed herein are methods for producing an in vitro transcribed RNA CAR. The present invention also includes (among other things) a CAR encoding RNA construct that can be directly transfected into a cell. A method for generating mRNA for use in transfection can involve in vitro transcription (IVT) of a template with specially designed primers, followed by polyA addition, to produce a construct containing 3′ and 5′ untranslated sequence (“UTR”), a 5′ cap and/or Internal Ribosome Entry Site (IRES), the nucleic acid to be expressed, and a polyA tail, typically 50-2000 bases in length (SEQ ID NO:118). RNA so produced can efficiently transfect different kinds of cells. In one aspect, the template includes sequences for the CAR.

[0713] In one aspect the CAR is encoded by a messenger RNA (mRNA). In one aspect the mRNA encoding the CAR is introduced into an immune effector cell, e.g., a T cell or a NK cell, for production of a CAR-expressing cell, e.g., a CART cell or a CAR NK cell.

[0714] In one embodiment, the in vitro transcribed RNA CAR can be introduced to a cell as a form of transient transfection. The RNA is produced by in vitro transcription using a polymerase chain reaction (PCR)-generated template. DNA of interest from any source can be directly converted by PCR into a template for in vitro mRNA synthesis using appropriate primers and RNA polymerase. The source of the DNA can be, for example, genomic DNA, plasmid DNA, phage DNA, cDNA, synthetic DNA sequence or any other appropriate source of DNA. A desired temple for in vitro transcription is a CAR of the present invention. For example, the template for the RNA CAR comprises an extracellular region comprising a single chain variable domain of an anti-tumor antibody; a hinge region, a transmembrane domain (e.g., a transmembrane domain of CD8a); and a cytoplasmic region that includes an intracellular signaling domain, e.g., comprising the signaling domain of CD3-zeta and the signaling domain of 4-1BB.

[0715] In one embodiment, the DNA to be used for PCR contains an open reading frame. The DNA can be from a naturally occurring DNA sequence from the genome of an organism. In one embodiment, the nucleic acid can include some or all of the 5′ and/or 3′ untranslated regions (UTRs). The nucleic acid can include exons and introns. In one embodiment, the DNA to be used for PCR is a human nucleic acid sequence. In another embodiment, the DNA to be used for PCR is a human nucleic acid sequence including the 5′ and 3′ UTRs. The DNA can alternatively be an artificial DNA sequence that is not normally expressed in a naturally occurring organism. An exemplary artificial DNA sequence is one that contains portions of genes that are ligated together to form an open reading frame that encodes a fusion protein. The portions of DNA that are ligated together can be from a single organism or from more than one organism.

[0716] PCR is used to generate a template for in vitro transcription of mRNA which is used for transfection. Methods for performing PCR are well known in the art. Primers for use in PCR are designed to have regions that are substantially complementary to regions of the DNA to be used as a template for the PCR. “Substantially complementary,” as used herein, refers to sequences of nucleotides where a majority or all of the bases in the primer sequence are complementary, or one or more bases are non-complementary, or mismatched. Substantially complementary sequences are able to anneal or hybridize with the intended DNA target under annealing conditions used for PCR. The primers can be designed to be substantially complementary to any portion of the DNA template. For example, the primers can be designed to amplify the portion of a nucleic acid that is normally transcribed in cells (the open reading frame), including 5′ and 3′ UTRs. The primers can also be designed to amplify a portion of a nucleic acid that encodes a particular domain of interest. In one embodiment, the primers are designed to amplify the coding region of a human cDNA, including all or portions of the 5′ and 3′ UTRs. Primers useful for PCR can be generated by synthetic methods that are well known in the art. “Forward primers” are primers that contain a region of nucleotides that are substantially complementary to nucleotides on the DNA template that are upstream of the DNA sequence that is to be amplified. “Upstream” is used herein to refer to a location 5, to the DNA sequence to be amplified relative to the coding strand. “Reverse primers” are primers that contain a region of nucleotides that are substantially complementary to a double-stranded DNA template that are downstream of the DNA sequence that is to be amplified. “Downstream” is used herein to refer to a location 3′ to the DNA sequence to be amplified relative to the coding strand.

[0717] Any DNA polymerase useful for PCR can be used in the methods disclosed herein. The reagents and polymerase are commercially available from a number of sources.

[0718] Chemical structures with the ability to promote stability and/or translation efficiency may also be used. The RNA in some embodiments has 5′ and 3′ UTRs. In one embodiment, the 5′ UTR is between one and 3000 nucleotides in length. The length of 5′ and 3′ UTR sequences to be added to the coding region can be altered by different methods, including, but not limited to, designing primers for PCR that anneal to different regions of the UTRs. Using this approach, one of ordinary skill in the art can modify the 5′ and 3′ UTR lengths required to achieve optimal translation efficiency following transfection of the transcribed RNA.

[0719] The 5′ and 3′ UTRs can be the naturally occurring, endogenous 5′ and 3′ UTRs for the nucleic acid of interest. Alternatively, UTR sequences that are not endogenous to the nucleic acid of interest can be added by incorporating the UTR sequences into the forward and reverse primers or by any other modifications of the template. The use of UTR sequences that are not endogenous to the nucleic acid of interest can be useful for modifying the stability and/or translation efficiency of the RNA. For example, it is known that AU-rich elements in 3′ UTR sequences can decrease the stability of mRNA. Therefore, 3′ UTRs can be selected or designed to increase the stability of the transcribed RNA based on properties of UTRs that are well known in the art.

[0720] In one embodiment, the 5′ UTR can contain the Kozak sequence of the endogenous nucleic acid. Alternatively, when a 5′ UTR that is not endogenous to the nucleic acid of interest is being added by PCR as described above, a consensus Kozak sequence can be redesigned by adding the 5′ UTR sequence. Kozak sequences can increase the efficiency of translation of some RNA transcripts, but does not appear to be required for all RNAs to enable efficient translation. The requirement for Kozak sequences for many mRNAs is known in the art. In other embodiments the 5′ UTR can be 5′UTR of an RNA virus whose RNA genome is stable in cells. In other embodiments various nucleotide analogues can be used in the 3′ or 5′ UTR to impede exonuclease degradation of the mRNA.

[0721] To enable synthesis of RNA from a DNA template without the need for gene cloning, a promoter of transcription should be attached to the DNA template upstream of the sequence to be transcribed. When a sequence that functions as a promoter for an RNA polymerase is added to the 5′ end of the forward primer, the RNA polymerase promoter becomes incorporated into the PCR product upstream of the open reading frame that is to be transcribed. In one embodiment, the promoter is a T7 polymerase promoter, as described elsewhere herein. Other useful promoters include, but are not limited to, T3 and SP6 RNA polymerase promoters. Consensus nucleotide sequences for T7, T3 and SP6 promoters are known in the art.

[0722] In an embodiment, the mRNA has both a cap on the 5′ end and a 3′ poly(A) tail which determine ribosome binding, initiation of translation and stability mRNA in the cell. On a circular DNA template, for instance, plasmid DNA, RNA polymerase produces a long concatameric product which is not suitable for expression in eukaryotic cells. The transcription of plasmid DNA linearized at the end of the 3′ UTR results in normal sized mRNA which is not effective in eukaryotic transfection even if it is polyadenylated after transcription.

[0723] On a linear DNA template, phage T7 RNA polymerase can extend the 3′ end of the transcript beyond the last base of the template (Schenborn and Mierendorf, Nuc Acids Res., 13:6223-36 (1985); Nacheva and Berzal-Herranz, Eur. J. Biochem., 270:1485-65 (2003).

[0724] The conventional method of integration of polyA/T stretches into a DNA template is molecular cloning. However polyA/T sequence integrated into plasmid DNA can cause plasmid instability, which is why plasmid DNA templates obtained from bacterial cells are often highly contaminated with deletions and other aberrations. This makes cloning procedures not only laborious and time consuming but often not reliable. That is why a method which allows construction of DNA templates with polyA/T 3′ stretch without cloning highly desirable.

[0725] The polyA/T segment of the transcriptional DNA template can be produced during PCR by using a reverse primer containing a polyT tail, such as 100T tail (SEQ ID NO: 29) (size can be 50-5000 T (SEQ ID NO: 30)), or after PCR by any other method, including, but not limited to, DNA ligation or in vitro recombination. Poly(A) tails also provide stability to RNAs and reduce their degradation. Generally, the length of a poly(A) tail positively correlates with the stability of the transcribed RNA. In one embodiment, the poly(A) tail is between 100 and 5000 adenosines (SEQ ID NO: 57).

[0726] Poly(A) tails of RNAs can be further extended following in vitro transcription with the use of a poly(A) polymerase, such as E. coli polyA polymerase (E-PAP). In one embodiment, increasing the length of a poly(A) tail from 100 nucleotides to between 300 and 400 nucleotides (SEQ ID NO: 104) results in about a two-fold increase in the translation efficiency of the RNA. Additionally, the attachment of different chemical groups to the 3′ end can increase mRNA stability. Such attachment can contain modified/artificial nucleotides, aptamers and other compounds. For example, ATP analogs can be incorporated into the poly(A) tail using poly(A) polymerase. ATP analogs can further increase the stability of the RNA.

[0727] 5′ caps on also provide stability to RNA molecules. In an embodiment, RNAs produced by the methods disclosed herein include a 5′ cap. The 5′ cap is provided using techniques known in the art and described herein (Cougot, et al., Trends in Biochem. Sci., 29:436-444 (2001); Stepinski, et al., RNA, 7:1468-95 (2001); Elango, et al., Biochim. Biophys. Res. Commun., 330:958-966 (2005)).

[0728] The RNAs produced by the methods disclosed herein can also contain an internal ribosome entry site (IRES) sequence. The IRES sequence may be any viral, chromosomal or artificially designed sequence which initiates cap-independent ribosome binding to mRNA and facilitates the initiation of translation. Any solutes suitable for cell electroporation, which can contain factors facilitating cellular permeability and viability such as sugars, peptides, lipids, proteins, antioxidants, and surfactants can be included.

[0729] RNA can be introduced into target cells using any of a number of different methods, for instance, commercially available methods which include, but are not limited to, electroporation (Amaxa Nucleofector-II (Amaxa Biosystems, Cologne, Germany)), (ECM 830 (BTX) (Harvard Instruments, Boston, Mass.) or the Gene Pulser II (BioRad, Denver, Colo.), Multiporator (Eppendort, Hamburg Germany), cationic liposome mediated transfection using lipofection, polymer encapsulation, peptide mediated transfection, or biolistic particle delivery systems such as “gene guns” (see, for example, Nishikawa, et al. Hum Gene Ther., 12(8):861-70 (2001).

[0730] Non-Viral Delivery Methods

[0731] In some aspects, non-viral methods can be used to deliver a nucleic acid encoding a CAR described herein into a cell or tissue or a subject.

[0732] In some embodiments, the non-viral method includes the use of a transposon (also called a transposable element). In some embodiments, a transposon is a piece of DNA that can insert itself at a location in a genome, for example, a piece of DNA that is capable of self-replicating and inserting its copy into a genome, or a piece of DNA that can be spliced out of a longer nucleic acid and inserted into another place in a genome. For example, a transposon comprises a DNA sequence made up of inverted repeats flanking genes for transposition.

[0733] Exemplary methods of nucleic acid delivery using a transposon include a Sleeping Beauty transposon system (SBTS) and a piggyBac (PB) transposon system. See, e.g., Aronovich et al. Hum. Mol. Genet. 20.R1(2011):R14-20; Singh et al. Cancer Res. 15(2008):2961-2971; Huang et al. Mol. Ther. 16(2008):580-589; Grabundzija et al. Mol. Ther. 18(2010):1200-1209; Kebriaei et al. Blood. 122.21(2013):166; Williams. Molecular Therapy 16.9(2008):1515-16; Bell et al. Nat. Protoc. 2.12(2007):3153-65; and Ding et al. Cell. 122.3(2005):473-83, all of which are incorporated herein by reference.

[0734] The SBTS includes two components: 1) a transposon containing a transgene and 2) a source of transposase enzyme. The transposase can transpose the transposon from a carrier plasmid (or other donor DNA) to a target DNA, such as a host cell chromosome/genome. For example, the transposase binds to the carrier plasmid/donor DNA, cuts the transposon (including transgene(s)) out of the plasmid, and inserts it into the genome of the host cell. See, e.g., Aronovich et al.

[0735] Exemplary transposons include a pT2-based transposon. See, e.g., Grabundzija et al. Nucleic Acids Res. 41.3(2013):1829-47; and Singh et al. Cancer Res. 68.8(2008): 2961-2971, all of which are incorporated herein by reference. Exemplary transposases include a Tc 1/mariner-type transposase, e.g., the SB10 transposase or the SB11 transposase (a hyperactive transposase which can be expressed, e.g., from a cytomegalovirus promoter). See, e.g., Aronovich et al.; Kebriaei et al.; and Grabundzija et al., all of which are incorporated herein by reference.

[0736] Use of the SBTS permits efficient integration and expression of a transgene, e.g., a nucleic acid encoding a CAR described herein. Provided herein are methods of generating a cell, e.g., T cell or NK cell, that stably expresses a CAR described herein, e.g., using a transposon system such as SBTS.

[0737] In accordance with methods described herein, in some embodiments, one or more nucleic acids, e.g., plasmids, containing the SBTS components are delivered to a cell (e.g., T or NK cell). For example, the nucleic acid(s) are delivered by standard methods of nucleic acid (e.g., plasmid DNA) delivery, e.g., methods described herein, e.g., electroporation, transfection, or lipofection. In some embodiments, the nucleic acid contains a transposon comprising a transgene, e.g., a nucleic acid encoding a CAR described herein. In some embodiments, the nucleic acid contains a transposon comprising a transgene (e.g., a nucleic acid encoding a CAR described herein) as well as a nucleic acid sequence encoding a transposase enzyme. In other embodiments, a system with two nucleic acids is provided, e.g., a dual-plasmid system, e.g., where a first plasmid contains a transposon comprising a transgene, and a second plasmid contains a nucleic acid sequence encoding a transposase enzyme. For example, the first and the second nucleic acids are co-delivered into a host cell.

[0738] In some embodiments, cells, e.g., T or NK cells, are generated that express a CAR described herein by using a combination of gene insertion using the SBTS and genetic editing using a nuclease (e.g., Zinc finger nucleases (ZFNs), Transcription Activator-Like Effector Nucleases (TALENs), the CRISPR/Cas system, or engineered meganuclease re-engineered homing endonucleases).

[0739] In some embodiments, use of a non-viral method of delivery permits reprogramming of cells, e.g., T or NK cells, and direct infusion of the cells into a subject. Advantages of non-viral vectors include but are not limited to the ease and relatively low cost of producing sufficient amounts required to meet a patient population, stability during storage, and lack of immunogenicity.

[0740] Nucleic Acid Constructs Encoding a CAR, e.g., a CD19 CAR, CD20 CAR, or CD22 CAR

[0741] The present invention also provides nucleic acid molecules encoding one or more CAR constructs described herein, e.g., CD19 CAR, CD20 CAR, or CD22 CAR. In one aspect, the nucleic acid molecule is provided as a messenger RNA transcript. In one aspect, the nucleic acid molecule is provided as a DNA construct.

[0742] Accordingly, in one aspect, the invention pertains to an isolated nucleic acid molecule encoding a chimeric antigen receptor (CAR), wherein the CAR comprises a binding domain (e.g., that binds CD19, CD20, or CD22) a transmembrane domain, and an intracellular signaling domain comprising a stimulatory domain, e.g., a costimulatory signaling domain and/or a primary signaling domain, e.g., zeta chain.

[0743] In one embodiment, the binding domain is an anti-CD19 binding domain described herein, e.g., an anti-CD19 binding domain which comprises a sequence selected from a group consisting of SEQ ID NO:1, SEQ ID NO:2, SEQ ID NO:3, SEQ ID NO:4, SEQ ID NO:5, SEQ ID NO:6, SEQ ID NO:7, SEQ ID NO:8, SEQ ID NO:9, SEQ ID NO:10, SEQ ID NO:11, SEQ ID NO:12 and SEQ ID NO:59, or a sequence with 95-99% identity thereof.

[0744] In one embodiment, the nucleic acid comprises CD22-encoding a nucleic acid set out in Table 6A or a sequence with 95-99% identity thereof. In one embodiment, the nucleic acid is a nucleic acid encoding an amino acid sequence set out in any of Tables 6A-10B or a sequence with 95-99% identity thereof.

[0745] In one embodiment, the nucleic acid comprises CD20-encoding a nucleic acid set out in Table 11A or a sequence with 95-99% identity thereof. In one embodiment, the nucleic acid is a nucleic acid encoding an amino acid sequence set out in any of Tables 11A-15B or a sequence with 95-99% identity thereof.

[0746] In one embodiment, the transmembrane domain is transmembrane domain of a protein selected from the group consisting of the alpha, beta or zeta chain of the T-cell receptor, CD28, CD3 epsilon, CD45, CD4, CD5, CD8, CD9, CD16, CD22, CD33, CD37, CD64, CD80, CD86, CD134, CD137 and CD154. In one embodiment, the transmembrane domain comprises a sequence of SEQ ID NO: 15, or a sequence with 95-99% identity thereof. In one embodiment, the anti-CD19 binding domain is connected to the transmembrane domain by a hinge region, e.g., a hinge described herein. In one embodiment, the hinge region comprises SEQ ID NO:14 or SEQ ID NO:45 or SEQ ID NO:47 or SEQ ID NO:49, or a sequence with 95-99% identity thereof. In one embodiment, the isolated nucleic acid molecule further comprises a sequence encoding a costimulatory domain. In one embodiment, the costimulatory domain is a functional signaling domain of a protein selected from the group consisting of OX40, CD27, CD28, ICAM-1, LFA-1 (CD11a/CD18), ICOS (CD278), and 4-1BB (CD137). In one embodiment, the costimulatory domain is a functional signaling domain of a protein selected from the group consisting of MHC class I molecule, TNF receptor proteins, Immunoglobulin-like proteins, cytokine receptors, integrins, signaling lymphocytic activation molecules (SLAM proteins), activating NK cell receptors, BTLA, a Toll ligand receptor, OX40, CD2, CD7, CD27, CD28, CD30, CD40, ICAM-1, LFA-1 (CD11a/CD18), 4-1BB (CD137), B7-H3, ICAM-1, ICOS (CD278), GITR, BAFFR, LIGHT, HVEM (LIGHTR), KIRDS2, SLAMF7, NKp80 (KLRF1), NKp44, NKp30, NKp46, CD19, CD4, CD8alpha, CD8beta, IL2R beta, IL2R gamma, IL7R alpha, ITGA4, VLA1, CD49a, ITGA4, IA4, CD49D, ITGA6, VLA-6, CD49f, ITGAD, CD11d, ITGAE, CD103, ITGAL, CD11a, LFA-1, ITGAM, CD11b, ITGAX, CD11c, ITGB1, CD29, ITGB2, CD18, LFA-1, ITGB7, NKG2D, NKG2C, TNFR2, TRANCE/RANKL, DNAM1 (CD226), SLAMF4 (CD244, 2B4), CD84, CD96 (Tactile), CEACAM1, CRTAM, Ly9 (CD229), CD160 (BY55), PSGL1, CD100 (SEMA4D), CD69, SLAMF6 (NTB-A, Ly108), SLAM (SLAMF1, CD150, IPO-3), BLAME (SLAMF8), SELPLG (CD162), LTBR, LAT, GADS, SLP-76, PAG/Cbp, CD19a, and a ligand that specifically binds with CD83. In one embodiment, the costimulatory domain comprises a sequence of SEQ ID NO:16, or a sequence with 95-99% identity thereof. In one embodiment, the intracellular signaling domain comprises a functional signaling domain of 4-1BB and a functional signaling domain of CD3 zeta. In one embodiment, the intracellular signaling domain comprises the sequence of SEQ ID NO: 16 or SEQ ID NO:51, or a sequence with 95-99% identity thereof, and the sequence of SEQ ID NO: 17 or SEQ ID NO:43, or a sequence with 95-99% identity thereof, wherein the sequences comprising the intracellular signaling domain are expressed in the same frame and as a single polypeptide chain.

[0747] In another aspect, the invention pertains to an isolated nucleic acid molecule encoding a CAR construct comprising a leader sequence of SEQ ID NO: 13, a scFv domain having a sequence selected from the group consisting of SEQ ID NO:1, SEQ ID NO:2, SEQ ID NO:3, SEQ ID NO:4, SEQ ID NO:5, SEQ ID NO:6, SEQ ID NO:7, SEQ ID NO:8, SEQ ID NO:9, SEQ ID NO:10, SEQ ID NO:11, SEQ ID NO:12, and SEQ ID NO:59, (or a sequence with 95-99% identity thereof), a hinge region of SEQ ID NO:14 or SEQ ID NO:45 or SEQ ID NO:47 or SEQ ID NO:49 (or a sequence with 95-99% identity thereof), a transmembrane domain having a sequence of SEQ ID NO: 15 (or a sequence with 95-99% identity thereof), a 4-1BB costimulatory domain having a sequence of SEQ ID NO:16 or a CD27 costimulatory domain having a sequence of SEQ ID NO:51 (or a sequence with 95-99% identity thereof), and a CD3 zeta stimulatory domain having a sequence of SEQ ID NO:17 or SEQ ID NO:43 (or a sequence with 95-99% identity thereof).

[0748] In another aspect, the invention pertains to an isolated polypeptide molecule encoded by the nucleic acid molecule. In one embodiment, the isolated polypeptide molecule comprises a sequence selected from the group consisting of SEQ ID NO:31, SEQ ID NO:32, SEQ ID NO:33, SEQ ID NO:34, SEQ ID NO:35, SEQ ID NO:36, SEQ ID NO:37, SEQ ID NO:38, SEQ ID NO:39, SEQ ID NO:40, SEQ ID NO:41, SEQ ID NO:42, SEQ ID NO:59 or a sequence with 95-99% identity thereof.

[0749] In another aspect, the invention pertains to a nucleic acid molecule encoding a chimeric antigen receptor (CAR) molecule that comprises an anti-CD19 binding domain, a transmembrane domain, and an intracellular signaling domain comprising a stimulatory domain, and wherein said anti-CD19 binding domain comprises a sequence selected from the group consisting of SEQ ID NO:1, SEQ ID NO:2, SEQ ID NO:3, SEQ ID NO:4, SEQ ID NO:5, SEQ ID NO:6, SEQ ID NO:7, SEQ ID NO:8, SEQ ID NO:9, SEQ ID NO:10, SEQ ID NO:11, SEQ ID NO:12 and SEQ ID NO:59, or a sequence with 95-99% identity thereof.

[0750] In one embodiment, the encoded CAR molecule (e.g., CD19 CAR, CD20 CAR, or CD22 CAR) further comprises a sequence encoding a costimulatory domain. In one embodiment, the costimulatory domain is a functional signaling domain of a protein selected from the group consisting of OX40, CD27, CD28, ICAM-1, LFA-1 (CD11a/CD18) and 4-1BB (CD137). In one embodiment, the costimulatory domain comprises a sequence of SEQ ID NO:16. In one embodiment, the transmembrane domain is a transmembrane domain of a protein selected from the group consisting of the alpha, beta or zeta chain of the T-cell receptor, CD28, CD3 epsilon, CD45, CD4, CD5, CD8, CD9, CD16, CD22, CD33, CD37, CD64, CD80, CD86, CD134, CD137 and CD154. In one embodiment, the transmembrane domain comprises a sequence of SEQ ID NO:15. In one embodiment, the intracellular signaling domain comprises a functional signaling domain of 4-1BB and a functional signaling domain of zeta. In one embodiment, the intracellular signaling domain comprises the sequence of SEQ ID NO: 16 and the sequence of SEQ ID NO: 17, wherein the sequences comprising the intracellular signaling domain are expressed in the same frame and as a single polypeptide chain. In one embodiment, the anti-CD19 binding domain is connected to the transmembrane domain by a hinge region. In one embodiment, the hinge region comprises SEQ ID NO:14. In one embodiment, the hinge region comprises SEQ ID NO:45 or SEQ ID NO:47 or SEQ ID NO:49.

[0751] In another aspect, the invention pertains to an encoded CAR molecule comprising a leader sequence of SEQ ID NO: 13, a scFv domain having a sequence selected from the group consisting of SEQ ID NO:1, SEQ ID NO:2, SEQ ID NO:3, SEQ ID NO:4, SEQ ID NO:5, SEQ ID NO:6, SEQ ID NO:7, SEQ ID NO:8, SEQ ID NO:9, SEQ ID NO:10, SEQ ID NO:11, SEQ ID NO:12, and SEQ ID NO:59, or a sequence with 95-99% identity thereof, a hinge region of SEQ ID NO:14 or SEQ ID NO:45 or SEQ ID NO:47 or SEQ ID NO:49, a transmembrane domain having a sequence of SEQ ID NO: 15, a 4-1BB costimulatory domain having a sequence of SEQ ID NO:16 or a CD27 costimulatory domain having a sequence of SEQ ID NO:51, and a CD3 zeta stimulatory domain having a sequence of SEQ ID NO:17 or SEQ ID NO:43. In one embodiment, the encoded CAR molecule comprises a sequence selected from a group consisting of SEQ ID NO:31, SEQ ID NO:32, SEQ ID NO:33, SEQ ID NO:34, SEQ ID NO:35, SEQ ID NO:36, SEQ ID NO:37, SEQ ID NO:38, SEQ ID NO:39, SEQ ID NO:40, SEQ ID NO:41, SEQ ID NO:42, and SEQ ID NO:59, or a sequence with 95-99% identity thereof.

[0752] The nucleic acid sequences coding for the desired molecules can be obtained using recombinant methods known in the art, such as, for example by screening libraries from cells expressing the gene, by deriving the gene from a vector known to include the same, or by isolating directly from cells and tissues containing the same, using standard techniques. Alternatively, the gene of interest can be produced synthetically, rather than cloned.

[0753] The present invention also provides vectors in which a DNA of the present invention is inserted. Vectors derived from retroviruses such as the lentivirus are suitable tools to achieve long-term gene transfer since they allow long-term, stable integration of a transgene and its propagation in daughter cells. Lentiviral vectors have the added advantage over vectors derived from onco-retroviruses such as murine leukemia viruses in that they can transduce non-proliferating cells, such as hepatocytes. They also have the added advantage of low immunogenicity. A retroviral vector may also be, e.g., a gammaretroviral vector. A gammaretroviral vector may include, e.g., a promoter, a packaging signal (w), a primer binding site (PBS), one or more (e.g., two) long terminal repeats (LTR), and a transgene of interest, e.g., a gene encoding a CAR. A gammaretroviral vector may lack viral structural gens such as gag, pol, and env. Exemplary gammaretroviral vectors include Murine Leukemia Virus (MLV), Spleen-Focus Forming Virus (SFFV), and Myeloproliferative Sarcoma Virus (MPSV), and vectors derived therefrom. Other gammaretroviral vectors are described, e.g., in Tobias Maetzig et al., “Gammaretroviral Vectors: Biology, Technology and Application” Viruses. 2011 June; 3(6): 677-713.

[0754] In another embodiment, the vector comprising the nucleic acid encoding the desired CAR of the invention is an adenoviral vector (A5/35). In another embodiment, the expression of nucleic acids encoding CARs can be accomplished using of transposons such as sleeping beauty, crispr, CAS9, and zinc finger nucleases. See below June et al. 2009 Nature Reviews Immunology 9.10: 704-716, is incorporated herein by reference.

[0755] A vector may also include, e.g., a signal sequence to facilitate secretion, a polyadenylation signal and transcription terminator (e.g., from Bovine Growth Hormone (BGH) gene), an element allowing episomal replication and replication in prokaryotes (e.g. SV40 origin and ColE1 or others known in the art) and/or elements to allow selection (e.g., ampicillin resistance gene and/or zeocin marker).

[0756] In brief summary, the expression of natural or synthetic nucleic acids encoding CARs is typically achieved by operably linking a nucleic acid encoding the CAR polypeptide or portions thereof to a promoter, and incorporating the construct into an expression vector. The vectors can be suitable for replication and integration eukaryotes. Typical cloning vectors contain transcription and translation terminators, initiation sequences, and promoters useful for regulation of the expression of the desired nucleic acid sequence.

[0757] In some aspects, the expression constructs of the present invention may also be used for nucleic acid immunization and gene therapy, using standard gene delivery protocols. Methods for gene delivery are known in the art. See, e.g., U.S. Pat. Nos. 5,399,346, 5,580,859, 5,589,466, incorporated by reference herein in their entireties. In another embodiment, the invention provides a gene therapy vector.

[0758] The nucleic acid can be cloned into a number of types of vectors. For example, the nucleic acid can be cloned into a vector including, but not limited to a plasmid, a phagemid, a phage derivative, an animal virus, and a cosmid. Vectors of particular interest include expression vectors, replication vectors, probe generation vectors, and sequencing vectors.

[0759] Further, the expression vector may be provided to a cell in the form of a viral vector. Viral vector technology is well known in the art and is described, for example, in Sambrook et al., 2012, MOLECULAR CLONING: A LABORATORY MANUAL, volumes 1-4, Cold Spring Harbor Press, NY), and in other virology and molecular biology manuals. Viruses, which are useful as vectors include, but are not limited to, retroviruses, adenoviruses, adeno-associated viruses, herpes viruses, and lentiviruses. In general, a suitable vector contains an origin of replication functional in at least one organism, a promoter sequence, convenient restriction endonuclease sites, and one or more selectable markers, (e.g., WO 01/96584; WO 01/29058; and U.S. Pat. No. 6,326,193).

[0760] A number of viral based systems have been developed for gene transfer into mammalian cells. For example, retroviruses provide a convenient platform for gene delivery systems. A selected gene can be inserted into a vector and packaged in retroviral particles using techniques known in the art. The recombinant virus can then be isolated and delivered to cells of the subject either in vivo or ex vivo. A number of retroviral systems are known in the art. In some embodiments, adenovirus vectors are used. A number of adenovirus vectors are known in the art. In one embodiment, lentivirus vectors are used.

[0761] Additional promoter elements, e.g., enhancers, regulate the frequency of transcriptional initiation. Typically, these are located in the region 30-110 bp upstream of the start site, although a number of promoters have been shown to contain functional elements downstream of the start site as well. The spacing between promoter elements frequently is flexible, so that promoter function is preserved when elements are inverted or moved relative to one another. In the thymidine kinase (tk) promoter, the spacing between promoter elements can be increased to 50 bp apart before activity begins to decline. Depending on the promoter, it appears that individual elements can function either cooperatively or independently to activate transcription. Exemplary promoters include the CMV IE gene, EF-1α, ubiquitin C, or phosphoglycerokinase (PGK) promoters. In an embodiment, the promoter is a PGK promoter, e.g., a truncated PGK promoter as described herein.

[0762] An example of a promoter that is capable of expressing a CAR transgene in a mammalian T cell is the EF1a promoter. The native EF1a promoter drives expression of the alpha subunit of the elongation factor-1 complex, which is responsible for the enzymatic delivery of aminoacyl tRNAs to the ribosome. The EF1a promoter has been extensively used in mammalian expression plasmids and has been shown to be effective in driving CAR expression from transgenes cloned into a lentiviral vector. See, e.g., Milone et al., Mol. Ther. 17(8): 1453-1464 (2009). In one aspect, the EF1a promoter comprises the sequence provided as SEQ ID NO:100.

[0763] Another example of a promoter is the immediate early cytomegalovirus (CMV) promoter sequence. This promoter sequence is a strong constitutive promoter sequence capable of driving high levels of expression of any polynucleotide sequence operatively linked thereto. However, other constitutive promoter sequences may also be used, including, but not limited to the simian virus 40 (SV40) early promoter, mouse mammary tumor virus (MMTV), human immunodeficiency virus (HIV) long terminal repeat (LTR) promoter, MoMuLV promoter, an avian leukemia virus promoter, an Epstein-Barr virus immediate early promoter, a Rous sarcoma virus promoter, as well as human gene promoters such as, but not limited to, the actin promoter, the myosin promoter, the elongation factor-1α promoter, the hemoglobin promoter, and the creatine kinase promoter. Further, the invention should not be limited to the use of constitutive promoters. Inducible promoters are also contemplated as part of the invention. The use of an inducible promoter provides a molecular switch capable of turning on expression of the polynucleotide sequence which it is operatively linked when such expression is desired, or turning off the expression when expression is not desired. Examples of inducible promoters include, but are not limited to a metallothionine promoter, a glucocorticoid promoter, a progesterone promoter, and a tetracycline promoter.

[0764] Another example of a promoter is the phosphoglycerate kinase (PGK) promoter. In embodiments, a truncated PGK promoter (e.g., a PGK promoter with one or more, e.g., 1, 2, 5, 10, 100, 200, 300, or 400, nucleotide deletions when compared to the wild-type PGK promoter sequence) may be desired. The nucleotide sequences of exemplary PGK promoters are provided below.

WT PGK Promoter:
(SEQ ID NO: 1323)
ACCCCTCTCTCCAGCCACTAAGCCAGTTGCTCCCTCGGCTGACGGCTGCA
CGCGAGGCCTCCGAACGTCTTACGCCTTGTGGCGCGCCCGTCCTTGTCCC
GGGTGTGATGGCGGGGTGTGGGGCGGAGGGCGTGGCGGGGAAGGGCCGGC
GACGAGAGCCGCGCGGGACGACTCGTCGGCGATAACCGGTGTCGGGTAGC
GCCAGCCGCGCGACGGTAACGAGGGACCGCGACAGGCAGACGCTCCCATG
ATCACTCTGCACGCCGAAGGCAAATAGTGCAGGCCGTGCGGCGCTTGGCG
TTCCTTGGAAGGGCTGAATCCCCGCCTCGTCCTTCGCAGCGGCCCCCCGG
GTGTTCCCATCGCCGCTTCTAGGCCCACTGCGACGCTTGCCTGCACTTCT
TACACGCTCTGGGTCCCAGCCGCGGCGACGCAAAGGGCCTTGGTGCGGGT
CTCGTCGGCGCAGGGACGCGTTTGGGTCCCGACGGAACCTTTTCCGCGTT
GGGGTTGGGGCACCATAAGCT

[0765] Exemplary Truncated PGK Promoters:

PGK100:
(SEQ ID NO: 1324)
ACCCCTCTCTCCAGCCACTAAGCCAGTTGCTCCCTCGGCTGACGGCTGCA
CGCGAGGCCTCCGAACGTCTTACGCCTTGTGGCGCGCCCGTCCTTGTCCC
GGGTGTGATGGCGGGGTG
PGK200:
(SEQ ID NO: 1325)
ACCCCTCTCTCCAGCCACTAAGCCAGTTGCTCCCTCGGCTGACGGCTGCA
CGCGAGGCCTCCGAACGTCTTACGCCTTGTGGCGCGCCCGTCCTTGTCCC
GGGTGTGATGGCGGGGTGTGGGGCGGAGGGCGTGGCGGGGAAGGGCCGGC
GACGAGAGCCGCGCGGGACGACTCGTCGGCGATAACCGGTGTCGGGTAGC
GCCAGCCGCGCGACGGTAACG
PGK300:
(SEQ ID NO: 1326)
ACCCCTCTCTCCAGCCACTAAGCCAGTTGCTCCCTCGGCTGACGGCTGCA
CGCGAGGCCTCCGAACGTCTTACGCCTTGTGGCGCGCCCGTCCTTGTCCC
GGGTGTGATGGCGGGGTGTGGGGCGGAGGGCGTGGCGGGGAAGGGCCGGC
GACGAGAGCCGCGCGGGACGACTCGTCGGCGATAACCGGTGTCGGGTAGC
GCCAGCCGCGCGACGGTAACGAGGGACCGCGACAGGCAGACGCTCCCATG
ATCACTCTGCACGCCGAAGGCAAATAGTGCAGGCCGTGCGGCGCTTGGCG
TTCCTTGGAAGGGCTGAATCCCCG
PGK400:
(SEQ ID NO: 1327)
ACCCCTCTCTCCAGCCACTAAGCCAGTTGCTCCCTCGGCTGACGGCTGCA
CGCGAGGCCTCCGAACGTCTTACGCCTTGTGGCGCGCCCGTCCTTGTCCC
GGGTGTGATGGCGGGGTGTGGGGCGGAGGGCGTGGCGGGGAAGGGCCGGC
GACGAGAGCCGCGCGGGACGACTCGTCGGCGATAACCGGTGTCGGGTAGC
GCCAGCCGCGCGACGGTAACGAGGGACCGCGACAGGCAGACGCTCCCATG
ATCACTCTGCACGCCGAAGGCAAATAGTGCAGGCCGTGCGGCGCTTGGCG
TTCCTTGGAAGGGCTGAATCCCCGCCTCGTCCTTCGCAGCGGCCCCCCGG
GTGTTCCCATCGCCGCTTCTAGGCCCACTGCGACGCTTGCCTGCACTTCT
TACACGCTCTGGGTCCCAGCCG

[0766] A vector may also include, e.g., a signal sequence to facilitate secretion, a polyadenylation signal and transcription terminator (e.g., from Bovine Growth Hormone (BGH) gene), an element allowing episomal replication and replication in prokaryotes (e.g. SV40 origin and ColE1 or others known in the art) and/or elements to allow selection (e.g., ampicillin resistance gene and/or zeocin marker).

[0767] In order to assess the expression of a CAR polypeptide or portions thereof, the expression vector to be introduced into a cell can also contain either a selectable marker gene or a reporter gene or both to facilitate identification and selection of expressing cells from the population of cells sought to be transfected or infected through viral vectors. In other aspects, the selectable marker may be carried on a separate piece of DNA and used in a co-transfection procedure. Both selectable markers and reporter genes may be flanked with appropriate regulatory sequences to enable expression in the host cells. Useful selectable markers include, for example, antibiotic-resistance genes, such as neo and the like.

[0768] Reporter genes are used for identifying potentially transfected cells and for evaluating the functionality of regulatory sequences. In general, a reporter gene is a gene that is not present in or expressed by the recipient organism or tissue and that encodes a polypeptide whose expression is manifested by some easily detectable property, e.g., enzymatic activity. Expression of the reporter gene is assayed at a suitable time after the DNA has been introduced into the recipient cells. Suitable reporter genes may include genes encoding luciferase, beta-galactosidase, chloramphenicol acetyl transferase, secreted alkaline phosphatase, or the green fluorescent protein gene (e.g., Ui-Tei et al., 2000 FEBS Letters 479: 79-82). Suitable expression systems are well known and may be prepared using known techniques or obtained commercially. In general, the construct with the minimal 5′ flanking region showing the highest level of expression of reporter gene is identified as the promoter. Such promoter regions may be linked to a reporter gene and used to evaluate agents for the ability to modulate promoter-driven transcription.

[0769] In embodiments, the vector may comprise two or more nucleic acid sequences encoding a CAR, e.g., a first CAR that binds to CD19 and a second CAR, e.g., an inhibitory CAR or a CAR that specifically binds to a second antigen, e.g., CD10, CD20, CD22, CD34, CD123, FLT-3, ROR1, CD79b, CD179b, or CD79a. In such embodiments, the two or more nucleic acid sequences encoding the CAR are encoded by a single nucleic molecule in the same frame and as a single polypeptide chain. In this aspect, the two or more CARs, can, e.g., be separated by one or more peptide cleavage sites. (e.g., an auto-cleavage site or a substrate for an intracellular protease). Examples of peptide cleavage sites include the following, wherein the GSG residues are optional:

T2A:
(SEQ ID NO: 1328)
(GSG)EGRGSLLTCGDVEENPGP
P2A:
(SEQ ID NO: 1329)
(GSG)ATNFSLLKQAGDVEENPGP
E2A:
(SEQ ID NO: 1330)
(GSG)QCTNYALLKLAGDVESNPGP
F2A:
(SEQ ID NO: 1331)
(GSG)VKQTLNFDLLKLAGDVESNPGP

[0770] Methods of introducing and expressing genes into a cell are known in the art. In the context of an expression vector, the vector can be readily introduced into a host cell, e.g., mammalian, bacterial, yeast, or insect cell by any method in the art. For example, the expression vector can be transferred into a host cell by physical, chemical, or biological means.

[0771] Physical methods for introducing a polynucleotide into a host cell include calcium phosphate precipitation, lipofection, particle bombardment, microinjection, electroporation, and the like. Methods for producing cells comprising vectors and/or exogenous nucleic acids are well-known in the art. See, for example, Sambrook et al., 2012, MOLECULAR CLONING: A LABORATORY MANUAL, volumes 1-4, Cold Spring Harbor Press, NY). A suitable method for the introduction of a polynucleotide into a host cell is calcium phosphate transfection

[0772] Biological methods for introducing a polynucleotide of interest into a host cell include the use of DNA and RNA vectors. Viral vectors, and especially retroviral vectors, have become the most widely used method for inserting genes into mammalian, e.g., human cells. Other viral vectors can be derived from lentivirus, poxviruses, herpes simplex virus I, adenoviruses and adeno-associated viruses, and the like. See, for example, U.S. Pat. Nos. 5,350,674 and 5,585,362.

[0773] Chemical means for introducing a polynucleotide into a host cell include colloidal dispersion systems, such as macromolecule complexes, nanocapsules, microspheres, beads, and lipid-based systems including oil-in-water emulsions, micelles, mixed micelles, and liposomes. An exemplary colloidal system for use as a delivery vehicle in vitro and in vivo is a liposome (e.g., an artificial membrane vesicle). Other methods of state-of-the-art targeted delivery of nucleic acids are available, such as delivery of polynucleotides with targeted nanoparticles or other suitable sub-micron sized delivery system.

[0774] In the case where a non-viral delivery system is utilized, an exemplary delivery vehicle is a liposome. The use of lipid formulations is contemplated for the introduction of the nucleic acids into a host cell (in vitro, ex vivo or in vivo). In another aspect, the nucleic acid may be associated with a lipid. The nucleic acid associated with a lipid may be encapsulated in the aqueous interior of a liposome, interspersed within the lipid bilayer of a liposome, attached to a liposome via a linking molecule that is associated with both the liposome and the oligonucleotide, entrapped in a liposome, complexed with a liposome, dispersed in a solution containing a lipid, mixed with a lipid, combined with a lipid, contained as a suspension in a lipid, contained or complexed with a micelle, or otherwise associated with a lipid. Lipid, lipid/DNA or lipid/expression vector associated compositions are not limited to any particular structure in solution. For example, they may be present in a bilayer structure, as micelles, or with a “collapsed” structure. They may also simply be interspersed in a solution, possibly forming aggregates that are not uniform in size or shape. Lipids are fatty substances which may be naturally occurring or synthetic lipids. For example, lipids include the fatty droplets that naturally occur in the cytoplasm as well as the class of compounds which contain long-chain aliphatic hydrocarbons and their derivatives, such as fatty acids, alcohols, amines, amino alcohols, and aldehydes.

[0775] Lipids suitable for use can be obtained from commercial sources. For example, dimyristyl phosphatidylcholine (“DMPC”) can be obtained from Sigma, St. Louis, MO; dicetyl phosphate (“DCP”) can be obtained from K & K Laboratories (Plainview, NY); cholesterol (“Choi”) can be obtained from Calbiochem-Behring; dimyristyl phosphatidylglycerol (“DMPG”) and other lipids may be obtained from Avanti Polar Lipids, Inc. (Birmingham, AL.). Stock solutions of lipids in chloroform or chloroform/methanol can be stored at about −20° C. Chloroform is used as the only solvent since it is more readily evaporated than methanol. “Liposome” is a generic term encompassing a variety of single and multilamellar lipid vehicles formed by the generation of enclosed lipid bilayers or aggregates. Liposomes can be characterized as having vesicular structures with a phospholipid bilayer membrane and an inner aqueous medium. Multilamellar liposomes have multiple lipid layers separated by aqueous medium. They form spontaneously when phospholipids are suspended in an excess of aqueous solution. The lipid components undergo self-rearrangement before the formation of closed structures and entrap water and dissolved solutes between the lipid bilayers (Ghosh et al., 1991 Glycobiology 5: 505-10). However, compositions that have different structures in solution than the normal vesicular structure are also encompassed. For example, the lipids may assume a micellar structure or merely exist as nonuniform aggregates of lipid molecules. Also contemplated are lipofectamine-nucleic acid complexes.

[0776] Regardless of the method used to introduce exogenous nucleic acids into a host cell or otherwise expose a cell to the inhibitor of the present invention, in order to confirm the presence of the recombinant DNA sequence in the host cell, a variety of assays may be performed. Such assays include, for example, “molecular biological” assays well known to those of skill in the art, such as Southern and Northern blotting, RT-PCR and PCR; “biochemical” assays, such as detecting the presence or absence of a particular peptide, e.g., by immunological means (ELISAs and Western blots) or by assays described herein to identify agents falling within the scope of the invention.

[0777] The present invention further provides a vector comprising a CAR encoding nucleic acid molecule. In one aspect, a CAR vector can be directly transduced into a cell, e.g., a T cell. In one aspect, the vector is a cloning or expression vector, e.g., a vector including, but not limited to, one or more plasmids (e.g., expression plasmids, cloning vectors, minicircles, minivectors, double minute chromosomes), retroviral and lentiviral vector constructs. In one aspect, the vector is capable of expressing the CAR construct in mammalian T cells. In one aspect, the mammalian T cell is a human T cell.

### Immune Effector Cells Expressing a CAR

[0778] In another aspect, the present invention provides a population of CAR-expressing cells. In some embodiments, the population of CAR-expressing cells comprises a cell that expresses one or more CARs described herein. In some embodiments, the population of CAR-expressing cells comprises a mixture of cells expressing different CARs.

[0779] For example, in one embodiment, the population of CART cells can include a first cell expressing a CAR having an antigen binding domain to a tumor antigen described herein, e.g., CD19, and a second cell expressing a CAR having a different antigen binding domain, e.g., an antigen binding domain to a different tumor antigen described herein, e.g., an antigen binding domain to a tumor antigen described herein that differs from the tumor antigen bound by the antigen binding domain of the CAR expressed by the first cell, e.g., CD10, CD20, CD22, CD34, CD123, FLT-3, ROR1, CD79b, CD179b, or CD79a.

[0780] As another example, the population of CAR-expressing cells can include a first cell expressing a CAR that includes an antigen binding domain to a tumor antigen described herein, and a second cell expressing a CAR that includes an antigen binding domain to a target other than a tumor antigen as described herein. In one embodiment, the population of CAR-expressing cells includes, e.g., a first cell expressing a CAR that includes a primary intracellular signaling domain, and a second cell expressing a CAR that includes a secondary signaling domain. Either one or both of the CAR expressing cells can have a truncated PGK promoter, e.g., as described herein, operably linked to the nucleic acid encoding the CAR.

[0781] In another aspect, the present invention provides a population of cells wherein at least one cell in the population expresses a CAR having an antigen binding domain to a tumor antigen described herein, and a second cell expressing another agent, e.g., an agent which enhances the activity of a CAR-expressing cell. The CAR expressing cells of the population can have a truncated PGK promoter, e.g., as described herein, operably linked to the nucleic acid encoding the CAR. In one embodiment, the agent can be an agent which inhibits an inhibitory molecule. Inhibitory molecules, e.g., PD-1, can, in some embodiments, decrease the ability of a CAR-expressing cell to mount an immune effector response. Examples of inhibitory molecules include PD-1, PD-L1, PD-L2, CTLA4, TIM3, CEACAM (CEACAM-1, CEACAM-3, and/or CEACAM-5), LAG3, VISTA, BTLA, TIGIT, LAIR1, CD160, 2B4, CD80, CD86, B7-H3 (CD276), B7-H4 (VTCN1), HVEM (TNFRSF14 or CD270), KIR, A2aR, MHC class I, MHC class II, GALS, adenosine, and TGFR (e.g., TGFRbeta). In one embodiment, the agent which inhibits an inhibitory molecule comprises a first polypeptide, e.g., an inhibitory molecule, associated with a second polypeptide that provides a positive signal to the cell, e.g., an intracellular signaling domain described herein. In one embodiment, the agent comprises a first polypeptide, e.g., of an inhibitory molecule such as PD1, PD-L1, CTLA4, TIM3, CEACAM (e.g., CEACAM-1, CEACAM-3, and/or CEACAM-5), LAG3, VISTA, BTLA, TIGIT, LAIR1, CD160, 2B4 or TGFR beta, or a fragment of any of these, and a second polypeptide which is an intracellular signaling domain described herein (e.g., comprising a costimulatory domain (e.g., 41BB, CD27, OX40 or CD28, e.g., as described herein) and/or a primary signaling domain (e.g., a CD3 zeta signaling domain described herein). In one embodiment, the agent comprises a first polypeptide of PD-1 or a fragment thereof, and a second polypeptide of an intracellular signaling domain described herein (e.g., a CD28 signaling domain described herein and/or a CD3 zeta signaling domain described herein).

Co-Expression of CAR with Other Molecules or Agents

[0782] Co-Expression of a Second CAR

[0783] In one aspect, the CAR-expressing cell described herein can further comprise a second CAR, e.g., a second CAR that includes a different antigen binding domain, e.g., to the same target (CD19) or a different target (e.g., CD10, CD20, CD22, CD34, CD123, FLT-3, ROR1, CD79b, CD179b, or CD79a). In one embodiment, the second CAR includes an antigen binding domain to a target expressed on acute myeloid leukemia cells, such as, e.g., CD20, CD22, ROR1, CD10, CD33, CLL-1, CD34, CD123, FLT3, CD79b, CD179b, and CD79a. In one embodiment, the CAR-expressing cell comprises a first CAR that targets a first antigen and includes an intracellular signaling domain having a costimulatory signaling domain but not a primary signaling domain, and a second CAR that targets a second, different, antigen and includes an intracellular signaling domain having a primary signaling domain but not a costimulatory signaling domain. While not wishing to be bound by theory, placement of a costimulatory signaling domain, e.g., 4-1BB, CD28, CD27 or OX-40, onto the first CAR, and the primary signaling domain, e.g., CD3 zeta, on the second CAR can limit the CAR activity to cells where both targets are expressed. In one embodiment, the CAR expressing cell comprises a first CD19 CAR that includes a CD19 binding domain, a transmembrane domain and a costimulatory domain and a second CAR that targets an antigen other than CD19 (e.g., an antigen expressed on AML, cells, e.g., CD22, CD20, ROR1, CD10, CD33, CLL-1, CD34, CD123, FLT3, CD79b, CD179b, or CD79a) and includes an antigen binding domain, a transmembrane domain and a primary signaling domain. In another embodiment, the CAR expressing cell comprises a first CD19 CAR that includes a CD19 binding domain, a transmembrane domain and a primary signaling domain and a second CAR that targets an antigen other than CD19 (e.g., an antigen expressed on AML cells, e.g., CD22, CD20, ROR1, CD10, CD33, CD123, CLL-1, CD34, FLT3, CD79b, CD179b, or CD79a) and includes an antigen binding domain to the antigen, a transmembrane domain and a costimulatory signaling domain.

[0784] In one aspect, the CAR-expressing cell described herein can further comprise a second CAR, e.g., a second CAR that includes a different antigen binding domain, e.g., to the same target (e.g., CD19) or a different target (e.g., a target other than CD19, e.g., CD10, CD20, CD22, CD34, CD123, FLT-3, ROR1, CD79b, CD179b, or CD79a). In one embodiment, the CAR-expressing cell comprises a first CAR that targets a first antigen and includes an intracellular signaling domain having a costimulatory signaling domain but not a primary signaling domain, and a second CAR that targets a second, different, antigen and includes an intracellular signaling domain having a primary signaling domain but not a costimulatory signaling domain. Placement of a costimulatory signaling domain, e.g., 4-1BB, CD28, CD27, OX-40 or ICOS, onto the first CAR, and the primary signaling domain, e.g., CD3 zeta, on the second CAR can limit the CAR activity to cells where both targets are expressed. In one embodiment, the CAR expressing cell comprises a first CAR that includes an antigen binding domain, a transmembrane domain and a costimulatory domain and a second CAR that targets another antigen and includes an antigen binding domain, a transmembrane domain and a primary signaling domain. In another embodiment, the CAR expressing cell comprises a first CAR that includes an antigen binding domain, a transmembrane domain and a primary signaling domain and a second CAR that targets another antigen and includes an antigen binding domain to the antigen, a transmembrane domain and a costimulatory signaling domain.

[0785] In one embodiment, the CAR-expressing cell comprises an XCAR described herein (e.g., CD19 CAR, CD20 CAR, or CD22 CAR) and an inhibitory CAR. In one embodiment, the CAR-expressing cell comprises a CD19 CAR described herein and an inhibitory CAR. In one embodiment, the inhibitory CAR comprises an antigen binding domain that binds an antigen found on normal cells but not cancer cells, e.g., normal cells that also express CD19. In one embodiment, the inhibitory CAR comprises the antigen binding domain, a transmembrane domain and an intracellular domain of an inhibitory molecule. For example, the intracellular domain of the inhibitory CAR can be an intracellular domain PD-1, PD-L1, PD-L2, CTLA4, TIM3, CEACAM (CEACAM-1, CEACAM-3, and/or CEACAM-5), LAG3, VISTA, BTLA, TIGIT, LAIR1, CD160, 2B4, CD80, CD86, B7-H3 (CD276), B7-H4 (VTCN1), HVEM (TNFRSF14 or CD270), KIR, A2aR, MHC class I, MHC class II, GALS, adenosine, and TGFR (e.g., TGFRbeta).

[0786] In one embodiment, when the CAR-expressing cell comprises two or more different CARs, the antigen binding domains of the different CARs can be such that the antigen binding domains do not interact with one another. For example, a cell expressing a first and second CAR can have an antigen binding domain of the first CAR, e.g., as a fragment, e.g., an scFv, that does not form an association with the antigen binding domain of the second CAR, e.g., the antigen binding domain of the second CAR is a VHH.

[0787] Co-Expression of an Agent that Enhances CAR Activity

[0788] In another aspect, the CAR-expressing cell described herein can further express another agent, e.g., an agent that enhances the activity or fitness of a CAR-expressing cell.

[0789] For example, in one embodiment, the agent can be an agent which inhibits a molecule that modulates or regulates, e.g., inhibits, T cell function. In some embodiments, the molecule that modulates or regulates T cell function is an inhibitory molecule. Inhibitory molecules, e.g., PD1, can, in some embodiments, decrease the ability of a CAR-expressing cell to mount an immune effector response. Examples of inhibitory molecules include PD1, PD-L1, PD-L2, CTLA4, TIM3, CEACAM (e.g., CEACAM-1, CEACAM-3 and/or CEACAM-5), LAG3, VISTA, BTLA, TIGIT, LAIR1, CD160, 2B4, CD160, 2B4, CD80, CD86, B7-H3 (CD276), B7-H4 (VTCN1), HVEM (TNFRSF14 or CD270), KIR, A2aR, MHC class I, MHC class II, GAL9, adenosine, and TGFR (e.g., TGFR beta).

[0790] In one embodiment, an inhibitory nucleic acid, e.g., an inhibitory nucleic acid, e.g., a dsRNA, e.g., an siRNA or shRNA, a clustered regularly interspaced short palindromic repeats (CRISPR), a transcription-activator like effector nuclease (TALEN), or a zinc finger endonuclease (ZFN), e.g., as described herein, can be used to inhibit expression of a molecule that modulates or regulates, e.g., inhibits, T-cell function in the CAR-expressing cell. In an embodiment the agent is an shRNA, e.g., an shRNA described herein. In an embodiment, the agent that modulates or regulates, e.g., inhibits, T-cell function is inhibited within a CAR-expressing cell. For example, a dsRNA molecule that inhibits expression of a molecule that modulates or regulates, e.g., inhibits, T-cell function is linked to the nucleic acid that encodes a component, e.g., all of the components, of the CAR.

[0791] In one embodiment, the agent which inhibits an inhibitory molecule comprises a first polypeptide, e.g., an inhibitory molecule, associated with a second polypeptide that provides a positive signal to the cell, e.g., an intracellular signaling domain described herein. In one embodiment, the agent comprises a first polypeptide, e.g., of an inhibitory molecule such as PD1, PD-L1, PD-L2, CTLA4, TIM3, CEACAM (e.g., CEACAM-1, CEACAM-3 and/or CEACAM-5), LAG3, VISTA, BTLA, TIGIT, LAIR1, CD160, 2B4, CD160, 2B4, CD80, CD86, B7-H3 (CD276), B7-H4 (VTCN1), HVEM (TNFRSF14 or CD270), KIR, A2aR, MEW class I, MHC class II, GAL9, adenosine, or TGFR (e.g., TGFR beta), or a fragment of any of these (e.g., at least a portion of an extracellular domain of any of these), and a second polypeptide which is an intracellular signaling domain described herein (e.g., comprising a costimulatory domain (e.g., 41BB, CD27 or CD28, e.g., as described herein) and/or a primary signaling domain (e.g., a CD3 zeta signaling domain described herein). In one embodiment, the agent comprises a first polypeptide of PD1 or a fragment thereof (e.g., at least a portion of an extracellular domain of PD1), and a second polypeptide of an intracellular signaling domain described herein (e.g., a CD28 signaling domain described herein and/or a CD3 zeta signaling domain described herein). PD1 is an inhibitory member of the CD28 family of receptors that also includes CD28, CTLA-4, ICOS, and BTLA. PD-1 is expressed on activated B cells, T cells and myeloid cells (Agata et al. 1996 Int. Immunol 8:765-75). Two ligands for PD1, PD-L1 and PD-L2 have been shown to downregulate T cell activation upon binding to PD1 (Freeman et a. 2000 J Exp Med 192:1027-34; Latchman et al. 2001 Nat Immunol 2:261-8; Carter et al. 2002 Eur J Immunol 32:634-43). PD-L1 is abundant in human cancers (Dong et al. 2003 J Mol Med 81:281-7; Blank et al. 2005 Cancer Immunol. Immunother 54:307-314; Konishi et al. 2004 Clin Cancer Res 10:5094). Immune suppression can be reversed by inhibiting the local interaction of PD1 with PD-L1.

[0792] In one embodiment, the agent comprises the extracellular domain (ECD) of an inhibitory molecule, e.g., Programmed Death 1 (PD1), can be fused to a transmembrane domain and intracellular signaling domains such as 41BB and CD3 zeta (also referred to herein as a PD1 CAR). In one embodiment, the PD1 CAR, when used in combinations with a CD19 CAR described herein, improves the persistence of the T cell. In one embodiment, the CAR is a PD1 CAR comprising the extracellular domain of PD1 indicated as underlined in SEQ ID NO: 121. In one embodiment, the PD1 CAR comprises the amino acid sequence of SEQ ID NO:121.

(SEQ ID NO: 121)
Malpvtalllplalllhaarppgwfldspdrpwnpptfspallvvtegdn
atftcsfsntsesfvlnwyrmspsnqtdklaafpedrsqpgqdcrfrvtq
lpngrdfhmsvvrarrndsgtylcgaislapkaqikeslraelrvterra
evptahpspsprpagqfqtlvtttpaprpptpaptiasqplslrpeacrp
aaggavhtrgldfacdiyiwaplagtcgvlllslvitlyckrgrkkllyi
fkqpfmrpvqttqeedgcscrfpeeeeggcelrvkfsrsadapaykqgqn
qlynelnlgrreeydvldkrrgrdpemggkprrknpqeglynelqkdkma
eayseigmkgerrrgkghdglyqglstatkdtydalhmqalppr.

[0793] In one embodiment, the PD1 CAR comprises the amino acid sequence provided below (SEQ ID NO:119).

(SEQ ID NO: 119)
pgwfldspdrpwnpptfspallvvtegdnatftcsfsntsesfvlnwyrm
spsnqtdklaafpedrsqpgqdcrfrvtqlpngrdfhmsvvrarrndsgt
ylcgaislapkaqikeslraelniterraevptahpspsprpagqfqtlv
tttpaprpptpaptiasqplslrpeacrpaaggavhtrgldfacdiyiwa
plagtcgvlllslvitlyckrgrkkllyifkqpfmrpvqttqeedgcscr
fpeeeeggcelrvkfsrsadapaykqgqnqlynelnlgrreeydvldkrr
grdpemggkprrknpqeglynelqkdkmaeayseigmkgerrrgkghdgl
yqglstatkdtydalhmqalppr.

[0794] Tin one embodiment, the agent comprises a nucleic acid sequence encoding the PD1 CAR, e.g., the PD1 CAR described herein. In one embodiment, the nucleic acid sequence for the PD1 CAR is shown below, with the PD1 ECD underlined below in SEQ ID NO: 120

(SEQ ID NO: 120)
atggccctccctgtcactgccctgcttctccccctcgcactcctgctcca
cgccgctagaccacccggatggtttctggactctccggatcgcccgtgga
atcccccaaccttctcaccggcactcttggttgtgactgagggcgataat
gcgaccttcacgtgctcgttctccaacacctccgaatcattcgtgctgaa
ctggtaccgcatgagcccgtcaaaccagaccgacaagctcgccgcgtttc
cggaagatcggtcgcaaccgggacaggattgtcggttccgcgtgactcaa
ctgccgaatggcagagacttccacatgagcgtggtccgcgctaggcgaaa
cgactccgggacctacctgtgcggagccatctcgctggcgcctaaggccc
aaatcaaagagagcttgagggccgaactgagagtgaccgagcgcagagct
gaggtgccaactgcacatccatccccatcgcctcggcctgcggggcagtt
tcagaccctggtcacgaccactccggcgccgcgcccaccgactccggccc
caactatcgcgagccagcccctgtcgctgaggccggaagcatgccgccct
gccgccggaggtgctgtgcatacccggggattggacttcgcatgcgacat
ctacatttgggctcctctcgccggaacttgtggcgtgctccttctgtccc
tggtcatcaccctgtactgcaagcggggtcggaaaaagcttctgtacatt
ttcaagcagcccttcatgaggcccgtgcaaaccacccaggaggaggacgg
ttgctcctgccggttccccgaagaggaagaaggaggttgcgagctgcgcg
tgaagttctcccggagcgccgacgcccccgcctataagcagggccagaac
cagctgtacaacgaactgaacctgggacggcgggaagagtacgatgtgct
ggacaagcggcgcggccgggaccccgaaatgggcgggaagcctagaagaa
agaaccctcaggaaggcctgtataacgagctgcagaaggacaagatggcc
gaggcctactccgaaattgggatgaagggagagcggcggaggggaaaggg
gcacgacggcctgtaccaaggactgtccaccgccaccaaggacacatacg
atgccctgcacatgcaggcccttccccctcgc.

[0795] In another example, in one embodiment, the agent which enhances the activity of a CAR-expressing cell can be a costimulatory molecule or costimulatory molecule ligand. Examples of costimulatory molecules include MHC class I molecule, BTLA and a Toll ligand receptor, as well as OX40, CD27, CD28, ICAM-1, LFA-1 (CD11a/CD18), ICOS (CD278), and 4-1BB (CD137). Further examples of such costimulatory molecules include ICAM-1, GITR, BAFFR, HVEM (LIGHTR), SLAMF7, NKp80 (KLRF1), NKp44, NKp30, NKp46, CD160, CD19, CD4, CD8alpha, CD8beta, IL2R beta, IL2R gamma, IL7R alpha, ITGA4, VLA1, CD49a, ITGA4, IA4, CD49D, ITGA6, VLA-6, CD49f, ITGAD, CD11d, ITGAE, CD103, ITGAL, CD11a, LFA-1, ITGAM, CD11b, ITGAX, CD11c, ITGB1, CD29, ITGB2, CD18, LFA-1, ITGB7, NKG2D, NKG2C, TNFR2, TRANCE/RANKL, DNAM1 (CD226), SLAMF4 (CD244, 2B4), CD84, CD96 (Tactile), CEACAM1, CRTAM, Ly9 (CD229), CD160 (BY55), PSGL1, CD100 (SEMA4D), CD69, SLAMF6 (NTB-A, Ly108), SLAM (SLAMF1, CD150, IPO-3), BLAME (SLAMF8), SELPLG (CD162), LTBR, LAT, GADS, SLP-76, PAG/Cbp, CD19a, and a ligand that specifically binds with CD83., e.g., as described herein. Examples of costimulatory molecule ligands include CD80, CD86, CD40L, ICOSL, CD70, OX40L, 4-1BBL, GITRL, and LIGHT. In embodiments, the costimulatory molecule ligand is a ligand for a costimulatory molecule different from the costimulatory molecule domain of the CAR. In embodiments, the costimulatory molecule ligand is a ligand for a costimulatory molecule that is the same as the costimulatory molecule domain of the CAR. In an embodiment, the costimulatory molecule ligand is 4-1BBL. In an embodiment, the costimulatory ligand is CD80 or CD86. In an embodiment, the costimulatory molecule ligand is CD70. In embodiments, a CAR-expressing immune effector cell described herein can be further engineered to express one or more additional costimulatory molecules or costimulatory molecule ligands.

Co-Expression of CAR with a Chemokine Receptor

[0796] In embodiments, the CAR-expressing cell described herein further comprises a chemokine receptor molecule. Transgenic expression of chemokine receptors CCR2b or CXCR2 in T cells enhances trafficking to CCL2- or CXCL1-secreting solid tumors including melanoma and neuroblastoma (Craddock et al., J Immunother. 2010 October; 33(8):780-8 and Kershaw et al., Hum Gene Ther. 2002 Nov. 1; 13(16):1971-80). Thus, without wishing to be bound by theory, it is believed that chemokine receptors expressed in CAR-expressing cells that recognize chemokines secreted by tumors, e.g., solid tumors, can improve homing of the CAR-expressing cell to the tumor, facilitate the infiltration of the CAR-expressing cell to the tumor, and enhances antitumor efficacy of the CAR-expressing cell. The chemokine receptor molecule can comprise a naturally occurring or recombinant chemokine receptor or a chemokine-binding fragment thereof. A chemokine receptor molecule suitable for expression in a CAR-expressing cell described herein include a CXC chemokine receptor (e.g., CXCR1, CXCR2, CXCR3, CXCR4, CXCR5, CXCR6, or CXCR7), a CC chemokine receptor (e.g., CCR1, CCR2, CCR3, CCR4, CCR5, CCR6, CCR7, CCR8, CCR9, CCR10, or CCR11), a CX3C chemokine receptor (e.g., CX3CR1), a XC chemokine receptor (e.g., XCR1), or a chemokine-binding fragment thereof. In one embodiment, the chemokine receptor molecule to be expressed with a CAR described herein is selected based on the chemokine(s) secreted by the tumor. In one embodiment, the CAR-expressing cell described herein further comprises, e.g., expresses, a CCR2b receptor or a CXCR2 receptor. In an embodiment, the CAR described herein and the chemokine receptor molecule are on the same vector or are on two different vectors. In embodiments where the CAR described herein and the chemokine receptor molecule are on the same vector, the CAR and the chemokine receptor molecule are each under control of two different promoters or are under the control of the same promoter.

### Conditional Expression of Immune Response-Enhancing Agents

[0797] Also provided herein are compositions and methods for conditionally expressing an agent that enhances the immune response or activity of a CAR-expressing cell described herein.

[0798] In one aspect, the present disclosure features an immune effector cell that is engineered to constitutively express a CAR, also referred to herein as a nonconditional CAR. In one embodiment, a nonconditional CAR as described herein comprises an antigen binding domain that binds to a cancer associated antigen, e.g., CD19, CD10, CD20, CD22, CD34, CD123, FLT-3, or ROR1. In embodiments, the nonconditional CAR-expressing immune effector cell further comprises a conditionally-expressed agent that enhances the therapeutic efficacy, e.g., the immune response, of the CAR-expressing immune effector cell. In such embodiments, the expression of the conditionally expressed agent occurs upon activation of the nonconditional CAR-expressing immune effector cell, e.g., upon binding of the nonconditional CAR molecule to its target, e.g., a cancer associated antigen, e.g., CD19, CD10, CD20, CD22, CD34, CD123, FLT-3, or ROR1.

[0799] Immune response-enhancing agents as described herein can be characterized by one or more of the following: 1) targets or binds to a different cancer associated antigen than that targeted by the nonconditional CAR; 2) inhibits the expression or activity of an immune checkpoint or inhibitory molecule; and/or 3) activates the expression and/or secretion of a component that enhances immune response or activation of an immune effector cell. The immune response-enhancing agent can be a polypeptide or a nucleic acid, e.g., a nucleic acid that encodes a polypeptide that enhances immune response. Examples of conditionally expressed agents that enhance the immune response include, but are not limited to, an additional CAR (referred to as a conditional CAR); a TCR-based molecule (e.g., a TCR-CAR); an inhibitor of an immune checkpoint or an inhibitory molecule; and/or a cytokine. In embodiments, the conditional CAR binds to a different cancer associated antigen than that targeted by the nonconditional CAR. In embodiments, the inhibitor of an immune checkpoint or inhibitory molecule described herein is an antibody or antigen binding fragment thereof, an inhibitory nucleic acid (e.g., an siRNA or shRNA), or a small molecule that inhibits or decreases the activity of an immune checkpoint or inhibitory molecule selected from PD1, PD-L1, CTLA4, TIM3, CEACAM (e.g., CEACAM-1, CEACAM-3 and/or CEACAM-5), LAG3, VISTA, BTLA, TIGIT, LAIR1, CD160, 2B4, CD80, CD86, B7-H3 (CD276), B7-H4 (VTCN1), HVEM (TNFRSF14 or CD270), KIR, A2aR, MHC class I, MHC class II, GALS, adenosine, or TGFR beta. In embodiments, the cytokine comprises IL-2, IL-7, IL-15, or IL-21, or functional fragments or derivatives thereof.

[0800] In embodiments, the immune effector cell comprises a nonconditional CAR and one or more conditional CARs, where the conditional CAR binds to a different cancer associated antigen than that targeted by the nonconditional CAR. By way of example, in one embodiment, an immune effector cell comprises a nonconditional CAR that binds to CD19 and one or more conditional CARs that bind to CD10, CD20, CD22, CD34, CD123, FLT-3, or ROR1, or a combination thereof. In another embodiment, an immune effector cell comprises a nonconditional CAR that binds to CD10, CD20, CD22, CD34, CD123, FLT-3, or ROR1 and a conditional CAR that binds to CD19.

[0801] Conditional expression of the agent that enhances the immune response upon activation of the CAR-expressing immune effector cell is achieved by operatively linking an activation-conditional control region to the agent that enhances the immune response (e.g., to a nucleic acid sequence encoding such an agent). In one embodiment, the activation conditional control region comprises a promoter sequence that initiates expression, e.g., transcription, of the operatively linked immune response enhancing agent upon activation of the immune effector cell. In one embodiment, the activation conditional control region comprises one or more regulatory sequences (e.g., a transcription factor binding sequence or site) that facilitate the initiation of expression upon activation of the immune effector cell. In embodiments, the activation-conditional control region comprises a promoter sequence and/or one or more transcription factor binding sequences from a promoter or regulatory sequence of a gene that is upregulated upon one or more of the following: immune effector cell (e.g., T cell) activation, T-cell differentiation, T-cell polarization, or helper T cell development. Examples of such genes include, but are not limited to, NFAT (nuclear factor of activated T cells), ATF2 (activating transcription factor 2), NF-κB (nuclear factor-KB), IL-2, IL-2 receptor (IL-2R), IL-3, GM-CSF, IL-4, IL-10, and IFN-γ.

[0802] In one embodiment, the activation-conditional control region comprises one or more, e.g., 1, 2, 3, 4, 5, 6, or more, NFAT binding sequences or sites. In embodiments, the NFAT-binding sequence in the promoter comprises (5′-GGAAA-3′) (SEQ ID NO: 1312), optionally situated in a longer consensus sequence of 5′ (A/T)GGAAA(A/N)(A/T/C)N 3′ (SEQ ID NO: 1313). In embodiments, the NFAT-binding sequence is a κb-like sequence such as GGGACT (SEQ ID NO: 1314). (See, Gibson et al., The Journal of Immunology, 2007, 179: 3831-3840.)

[0803] In one embodiment, the activation-conditional control region further comprises an IL-2 promoter (or a minimal IL-2 promoter), an IL-2R promoter, an ATF2 promoter, or a NF-κB promoter, or any functional fragment or derivative thereof. In one embodiment, the activation-conditional control region comprises one or more NFAT-binding sequences, e.g., 3 or 6 NFAT-binding sequences, and an IL-2 promoter, e.g., an IL-2 minimal promoter. In one embodiment, the activation-conditional control region comprises the sequence of

(SEQ ID NO: 1315)
AGCTTGGATCCAAGAGGAAAATTTGTTTCATACAGAAGGCGTTAAGAGGA
AAATTTGTTTCATACAGAAGGCGTTAAGAGGAAAATTTGTTTCATACAGA
AGGCGTTCAAGCTTGTCGAC.

### Sources of Cells

[0804] Prior to expansion and genetic modification or other modification, a source of cells, e.g., T cells or natural killer (NK) cells, can be obtained from a subject. Examples of subjects include humans, monkeys, chimpanzees, dogs, cats, mice, rats, and transgenic species thereof. T cells can be obtained from a number of sources, including peripheral blood mononuclear cells, bone marrow, lymph node tissue, cord blood, thymus tissue, tissue from a site of infection, ascites, pleural effusion, spleen tissue, and tumors.

[0805] In certain aspects of the present disclosure, immune effector cells, e.g., T cells, can be obtained from a unit of blood collected from a subject using any number of techniques known to the skilled artisan, such as Ficoll™ separation. In one aspect, cells from the circulating blood of an individual are obtained by apheresis. The apheresis product typically contains lymphocytes, including T cells, monocytes, granulocytes, B cells, other nucleated white blood cells, red blood cells, and platelets. In one aspect, the cells collected by apheresis may be washed to remove the plasma fraction and, optionally, to place the cells in an appropriate buffer or media for subsequent processing steps. In one embodiment, the cells are washed with phosphate buffered saline (PBS). In an alternative embodiment, the wash solution lacks calcium and may lack magnesium or may lack many if not all divalent cations.

[0806] Initial activation steps in the absence of calcium can lead to magnified activation. As those of ordinary skill in the art would readily appreciate a washing step may be accomplished by methods known to those in the art, such as by using a semi-automated “flow-through” centrifuge (for example, the Cobe 2991 cell processor, the Baxter CytoMate, or the Haemonetics Cell Saver 5) according to the manufacturer's instructions. After washing, the cells may be resuspended in a variety of biocompatible buffers, such as, for example, Ca-free, Mg-free PBS, PlasmaLyte A, or other saline solution with or without buffer. Alternatively, the undesirable components of the apheresis sample may be removed and the cells directly resuspended in culture media.

[0807] It is recognized that the methods of the application can utilize culture media conditions comprising 5% or less, for example 2%, human AB serum, and employ known culture media conditions and compositions, for example those described in Smith et al., “Ex vivo expansion of human T cells for adoptive immunotherapy using the novel Xeno-free CTS Immune Cell Serum Replacement” Clinical & Translational Immunology (2015) 4, e31; doi:10.1038/cti.2014.31.

[0808] In one aspect, T cells are isolated from peripheral blood lymphocytes by lysing the red blood cells and depleting the monocytes, for example, by centrifugation through a PERCOLL™ gradient or by counterflow centrifugal elutriation.

[0809] The methods described herein can include, e.g., selection of a specific subpopulation of immune effector cells, e.g., T cells, that are a T regulatory cell-depleted population, CD25+ depleted cells, using, e.g., a negative selection technique, e.g., described herein. In some embodiments, the population of T regulatory depleted cells contains less than 30%, 25%, 20%, 15%, 10%, 5%, 4%, 3%, 2%, 1% of CD25+ cells.

[0810] In one embodiment, T regulatory cells, e.g., CD25+ T cells, are removed from the population using an anti-CD25 antibody, or fragment thereof, or a CD25-binding ligand, IL-2. In one embodiment, the anti-CD25 antibody, or fragment thereof, or CD25-binding ligand is conjugated to a substrate, e.g., a bead, or is otherwise coated on a substrate, e.g., a bead. In one embodiment, the anti-CD25 antibody, or fragment thereof, is conjugated to a substrate as described herein.

[0811] In one embodiment, the T regulatory cells, e.g., CD25+ T cells, are removed from the population using CD25 depletion reagent from Miltenyi™. In one embodiment, the ratio of cells to CD25 depletion reagent is 1e7 cells to 20 uL, or 1e7 cells to 15 uL, or 1e7 cells to 10 uL, or 1e7 cells to 5 uL, or 1e7 cells to 2.5 uL, or 1e7 cells to 1.25 uL. In one embodiment, e.g., for T regulatory cells, e.g., CD25+ depletion, greater than 500 million cells/ml is used. In a further aspect, a concentration of cells of 600, 700, 800, or 900 million cells/ml is used.

[0812] In one embodiment, the population of immune effector cells to be depleted includes about 6×10⁹ CD25+ T cells. In other aspects, the population of immune effector cells to be depleted include about 1×10⁹ to 1×10¹⁰ CD25+ T cell, and any integer value in between. In one embodiment, the resulting population T regulatory depleted cells has 2×10⁹ T regulatory cells, e.g., CD25+ cells, or less (e.g., 1×10⁹, 5×10⁸, 1×10⁸, 5×10⁷, 1×10⁷, or less CD25+ cells).

[0813] In one embodiment, the T regulatory cells, e.g., CD25+ cells, are removed from the population using the CliniMAC system with a depletion tubing set, such as, e.g., tubing 162-01. In one embodiment, the CliniMAC system is run on a depletion setting such as, e.g., DEPLETION2.1.

[0814] Without wishing to be bound by a particular theory, decreasing the level of negative regulators of immune cells (e.g., decreasing the number of unwanted immune cells, e.g., T_{REG} cells), in a subject prior to apheresis or during manufacturing of a CAR-expressing cell product significantly reduces the risk of subject relapse. For example, methods of depleting T_{REG} cells are known in the art. Methods of decreasing T_{REG} cells include, but are not limited to, cyclophosphamide, anti-GITR antibody (an anti-GITR antibody described herein), CD25-depletion, mTOR inhibitor, and combinations thereof.

[0815] In some embodiments, the manufacturing methods comprise reducing the number of (e.g., depleting) T_{REG} cells prior to manufacturing of the CAR-expressing cell. For example, manufacturing methods comprise contacting the sample, e.g., the apheresis sample, with an anti-GITR antibody and/or an anti-CD25 antibody (or fragment thereof, or a CD25-binding ligand), e.g., to deplete T_{REG} cells prior to manufacturing of the CAR-expressing cell (e.g., T cell, NK cell) product.

[0816] Without wishing to be bound by a particular theory, decreasing the level of negative regulators of immune cells (e.g., decreasing the number of unwanted immune cells, e.g., T_{REG} cells), in a subject prior to apheresis or during manufacturing of a CAR-expressing cell product can reduce the risk of a T_{REG} relapse. In an embodiment, a subject is pre-treated with one or more therapies that reduce T_{REG} cells prior to collection of cells for CAR-expressing cell product manufacturing, thereby reducing the risk of subject relapse to CAR-expressing cell treatment. In an embodiment, methods of decreasing T_{REG} cells include, but are not limited to, administration to the subject of one or more of cyclophosphamide, anti-GITR antibody, CD25-depletion, or a combination thereof. In an embodiment, methods of decreasing T_{REG} cells include, but are not limited to, administration to the subject of one or more of cyclophosphamide, anti-GITR antibody, CD25-depletion, mTOR inhibitor, or a combination thereof. Administration of one or more of cyclophosphamide, anti-GITR antibody, CD25-depletion, or a combination thereof, can occur before, during or after an infusion of the CAR-expressing cell product. Administration of one or more of cyclophosphamide, anti-GITR antibody, CD25-depletion, mTOR inhibitor, or a combination thereof, can occur before, during or after an infusion of the CAR-expressing cell product.

[0817] In some embodiments, the manufacturing methods comprise reducing the number of (e.g., depleting) T_{REG} cells prior to manufacturing of the CAR-expressing cell. For example, manufacturing methods comprise contacting the sample, e.g., the apheresis sample, with an anti-GITR antibody and/or an anti-CD25 antibody (or fragment thereof, or a CD25-binding ligand), e.g., to deplete T_{REG} cells prior to manufacturing of the CAR-expressing cell (e.g., T cell, NK cell) product.

[0818] In an embodiment, a subject is pre-treated with one or more therapies that reduce T_{REG} cells prior to collection of cells for CAR-expressing cell product manufacturing, thereby reducing the risk of subject relapse to CAR-expressing cell treatment. In an embodiment, methods of decreasing T_{REG} cells include, but are not limited to, administration to the subject of one or more of cyclophosphamide, anti-GITR antibody, CD25-depletion, or a combination thereof. Administration of one or more of cyclophosphamide, anti-GITR antibody, CD25-depletion, or a combination thereof, can occur before, during or after an infusion of the CAR-expressing cell product.

[0819] In an embodiment, a subject is pre-treated with cyclophosphamide prior to collection of cells for CAR-expressing cell product manufacturing, thereby reducing the risk of subject relapse to CAR-expressing cell treatment. In an embodiment, a subject is pre-treated with an anti-GITR antibody prior to collection of cells for CAR-expressing cell product manufacturing, thereby reducing the risk of subject relapse to CAR-expressing cell treatment.

[0820] In one embodiment, the population of cells to be removed are neither the regulatory T cells or tumor cells, but cells that otherwise negatively affect the expansion and/or function of CART cells, e.g. cells expressing CD14, CD11b, CD33, CD15, or other markers expressed by potentially immune suppressive cells. In one embodiment, such cells are envisioned to be removed concurrently with regulatory T cells and/or tumor cells, or following said depletion, or in another order.

[0821] The methods described herein can include more than one selection step, e.g., more than one depletion step. Enrichment of a T cell population by negative selection can be accomplished, e.g., with a combination of antibodies directed to surface markers unique to the negatively selected cells. One method is cell sorting and/or selection via negative magnetic immunoadherence or flow cytometry that uses a cocktail of monoclonal antibodies directed to cell surface markers present on the cells negatively selected. For example, to enrich for CD4+ cells by negative selection, a monoclonal antibody cocktail can include antibodies to CD14, CD20, CD11b, CD16, HLA-DR, and CD8.

[0822] The methods described herein can further include removing cells from the population which express a tumor antigen, e.g., a tumor antigen that does not comprise CD25, e.g., CD19, CD30, CD38, CD123, CD20, CD14 or CD11b, to thereby provide a population of T regulatory depleted, e.g., CD25+ depleted, and tumor antigen depleted cells that are suitable for expression of a CAR, e.g., a CAR described herein. In one embodiment, tumor antigen expressing cells are removed simultaneously with the T regulatory, e.g., CD25+ cells. For example, an anti-CD25 antibody, or fragment thereof, and an anti-tumor antigen antibody, or fragment thereof, can be attached to the same substrate, e.g., bead, which can be used to remove the cells or an anti-CD25 antibody, or fragment thereof, or the anti-tumor antigen antibody, or fragment thereof, can be attached to separate beads, a mixture of which can be used to remove the cells. In other embodiments, the removal of T regulatory cells, e.g., CD25+ cells, and the removal of the tumor antigen expressing cells is sequential, and can occur, e.g., in either order.

[0823] Also provided are methods that include removing cells from the population which express a check point inhibitor, e.g., a check point inhibitor described herein, e.g., one or more of PD1+ cells, LAG3+ cells, and TIM3+ cells, to thereby provide a population of T regulatory depleted, e.g., CD25+ depleted cells, and check point inhibitor depleted cells, e.g., PD1+, LAG3+ and/or TIM3+ depleted cells. Exemplary check point inhibitors include PD1, PD-L1, PD-L2, CTLA4, TIM3, CEACAM (e.g., CEACAM-1, CEACAM-3 and/or CEACAM-5), LAG3, VISTA, BTLA, TIGIT, LAME CD160, 2B4, CD80, CD86, B7-H3 (CD276), B7-H4 (VTCN1), HVEM (TNFRSF14 or CD270), KIR, A2aR, MHC class I, MHC class II, GALS, adenosine, and TGFR (e.g., TGFRbeta), e.g., as described herein. In one embodiment, check point inhibitor expressing cells are removed simultaneously with the T regulatory, e.g., CD25+ cells. For example, an anti-CD25 antibody, or fragment thereof, and an anti-check point inhibitor antibody, or fragment thereof, can be attached to the same bead which can be used to remove the cells, or an anti-CD25 antibody, or fragment thereof, and the anti-check point inhibitor antibody, or fragment thereof, can be attached to separate beads, a mixture of which can be used to remove the cells. In other embodiments, the removal of T regulatory cells, e.g., CD25+ cells, and the removal of the check point inhibitor expressing cells is sequential, and can occur, e.g., in either order.

[0824] Methods described herein can include a positive selection step For example, T cells can be isolated by incubation with anti-CD3/anti-CD28 (e.g., 3×28)-conjugated beads, such as DYNABEADS® M-450 CD3/CD28 T, for a time period sufficient for positive selection of the desired T cells. In one aspect, the time period is about 30 minutes. In a further aspect, the time period ranges from 30 minutes to 36 hours or longer and all integer values there between. In a further aspect, the time period is at least 1, 2, 3, 4, 5, or 6 hours. In yet another aspect, the time period is 10 to 24 hours. In one aspect, the incubation time period is 24 hours. Longer incubation times may be used to isolate T cells in any situation where there are few T cells as compared to other cell types, such in isolating tumor infiltrating lymphocytes (TIL) from tumor tissue or from immunocompromised individuals. Further, use of longer incubation times can increase the efficiency of capture of CD8+ T cells. Thus, by simply shortening or lengthening the time T cells are allowed to bind to the CD3/CD28 beads and/or by increasing or decreasing the ratio of beads to T cells (as described further herein), subpopulations of T cells can be preferentially selected for or against at culture initiation or at other time points during the process. Additionally, by increasing or decreasing the ratio of anti-CD3 and/or anti-CD28 antibodies on the beads or other surface, subpopulations of T cells can be preferentially selected for or against at culture initiation or at other desired time points.

[0825] In one embodiment, a T cell population can be selected that expresses one or more of IFN-γ, TNFα, IL-17A, IL-2, IL-3, IL-4, GM-CSF, IL-10, IL-13, granzyme B, and perforin, or other appropriate molecules, e.g., other cytokines. Methods for screening for cell expression can be determined, e.g., by the methods described in PCT Publication No.: WO 2013/126712.

[0826] For isolation of a desired population of cells by positive or negative selection, the concentration of cells and surface (e.g., particles such as beads) can be varied. In certain aspects, it may be desirable to significantly decrease the volume in which beads and cells are mixed together (e.g., increase the concentration of cells), to ensure maximum contact of cells and beads. For example, in one aspect, a concentration of about 10 billion cells/ml, 9 billion/ml, 8 billion/ml, 7 billion/ml, 6 billion/ml, or 5 billion/ml is used. In one aspect, a concentration of 1 billion cells/ml is used. In one aspect, a concentration of cells from 75, 80, 85, 90, 95, or 100 million cells/ml is used. In further aspects, concentrations of 125 or 150 million cells/ml can be used.

[0827] Using high concentrations can result in increased cell yield, cell activation, and cell expansion. Further, use of high cell concentrations allows more efficient capture of cells that may weakly express target antigens of interest, such as CD28-negative T cells, or from samples where there are many tumor cells present (e.g., leukemic blood, tumor tissue, etc.). Such populations of cells may have therapeutic value and would be desirable to obtain. For example, using high concentration of cells allows more efficient selection of CD8+ T cells that normally have weaker CD28 expression.

[0828] In a related aspect, it may be desirable to use lower concentrations of cells. By significantly diluting the mixture of T cells and surface (e.g., particles such as beads), interactions between the particles and cells is minimized. This selects for cells that express high amounts of desired antigens to be bound to the particles. For example, CD4+ T cells express higher levels of CD28 and are more efficiently captured than CD8+ T cells in dilute concentrations. In one aspect, the concentration of cells used is 5×10⁶/ml. In other aspects, the concentration used can be from about 1×10⁵/ml to 1×10⁶/ml, and any integer value in between.

[0829] In other aspects, the cells may be incubated on a rotator for varying lengths of time at varying speeds at either 2-10° C. or at room temperature.

[0830] T cells for stimulation can also be frozen after a washing step. Wishing not to be bound by theory, the freeze and subsequent thaw step provides a more uniform product by removing granulocytes and to some extent monocytes in the cell population. After the washing step that removes plasma and platelets, the cells may be suspended in a freezing solution. While many freezing solutions and parameters are known in the art and will be useful in this context, one method involves using PBS containing 20% DMSO and 8% human serum albumin, or culture media containing 10% Dextran 40 and 5% Dextrose, 20% Human Serum Albumin and 7.5% DMSO, or 31.25% Plasmalyte-A, 31.25% Dextrose 5%, 0.45% NaCl, 10% Dextran 40 and 5% Dextrose, 20% Human Serum Albumin, and 7.5% DMSO or other suitable cell freezing media containing for example, Hespan and PlasmaLyte A, the cells then are frozen to −80° C. at a rate of 1° per minute and stored in the vapor phase of a liquid nitrogen storage tank. Other methods of controlled freezing may be used as well as uncontrolled freezing immediately at −20° C. or in liquid nitrogen.

[0831] In certain aspects, cryopreserved cells are thawed and washed as described herein and allowed to rest for one hour at room temperature prior to activation using the methods of the present invention.

[0832] Also contemplated in the context of the invention is the collection of blood samples or apheresis product from a subject at a time period prior to when the expanded cells as described herein might be needed. As such, the source of the cells to be expanded can be collected at any time point necessary, and desired cells, such as T cells, isolated and frozen for later use in immune effector cell therapy for any number of diseases or conditions that would benefit from immune effector cell therapy, such as those described herein. In one aspect a blood sample or an apheresis is taken from a generally healthy subject. In certain aspects, a blood sample or an apheresis is taken from a generally healthy subject who is at risk of developing a disease, but who has not yet developed a disease, and the cells of interest are isolated and frozen for later use. In certain aspects, the T cells may be expanded, frozen, and used at a later time. In certain aspects, samples are collected from a patient shortly after diagnosis of a particular disease as described herein but prior to any treatments. In a further aspect, the cells are isolated from a blood sample or an apheresis from a subject prior to any number of relevant treatment modalities, including but not limited to treatment with agents such as natalizumab, efalizumab, antiviral agents, chemotherapy, radiation, immunosuppressive agents, such as cyclosporin, azathioprine, methotrexate, mycophenolate, and FK506, antibodies, or other immunoablative agents such as CAMPATH, anti-CD3 antibodies, cytoxan, fludarabine, cyclosporin, FK506, rapamycin, mycophenolic acid, steroids, FR901228, and irradiation.

[0833] In a further aspect of the present invention, T cells are obtained from a patient directly following treatment that leaves the subject with functional T cells. In this regard, it has been observed that following certain cancer treatments, in particular treatments with drugs that damage the immune system, shortly after treatment during the period when patients would normally be recovering from the treatment, the quality of T cells obtained may be optimal or improved for their ability to expand ex vivo. Likewise, following ex vivo manipulation using the methods described herein, these cells may be in a preferred state for enhanced engraftment and in vivo expansion. Thus, it is contemplated within the context of the present invention to collect blood cells, including T cells, dendritic cells, or other cells of the hematopoietic lineage, during this recovery phase. Further, in certain aspects, mobilization (for example, mobilization with GM-CSF) and conditioning regimens can be used to create a condition in a subject wherein repopulation, recirculation, regeneration, and/or expansion of particular cell types is favored, especially during a defined window of time following therapy. Illustrative cell types include T cells, B cells, dendritic cells, and other cells of the immune system.

[0834] In one embodiment, the immune effector cells expressing a CAR molecule, e.g., a CAR molecule described herein, are obtained from a subject that has received a low, immune enhancing dose of an mTOR inhibitor. In an embodiment, the population of immune effector cells, e.g., T cells, to be engineered to express a CAR, are harvested after a sufficient time, or after sufficient dosing of the low, immune enhancing, dose of an mTOR inhibitor, such that the level of PD1 negative immune effector cells, e.g., T cells, or the ratio of PD1 negative immune effector cells, e.g., T cells/PD1 positive immune effector cells, e.g., T cells, in the subject or harvested from the subject has been, at least transiently, increased.

[0835] In other embodiments, population of immune effector cells, e.g., T cells, which have, or will be engineered to express a CAR, can be treated ex vivo by contact with an amount of an mTOR inhibitor that increases the number of PD1 negative immune effector cells, e.g., T cells or increases the ratio of PD1 negative immune effector cells, e.g., T cells/PD1 positive immune effector cells, e.g., T cells.

[0836] In one embodiment, a T cell population is diacylglycerol kinase (DGK)-deficient. DGK-deficient cells include cells that do not express DGK RNA or protein, or have reduced or inhibited DGK activity. DGK-deficient cells can be generated by genetic approaches, e.g., administering RNA-interfering agents, e.g., siRNA, shRNA, miRNA, to reduce or prevent DGK expression. Alternatively, DGK-deficient cells can be generated by treatment with DGK inhibitors described herein.

[0837] In one embodiment, a T cell population is Ikaros-deficient. Ikaros-deficient cells include cells that do not express Ikaros RNA or protein, or have reduced or inhibited Ikaros activity, Ikaros-deficient cells can be generated by genetic approaches, e.g., administering RNA-interfering agents, e.g., siRNA, shRNA, miRNA, to reduce or prevent Ikaros expression. Alternatively, Ikaros-deficient cells can be generated by treatment with Ikaros inhibitors, e.g., lenalidomide.

[0838] In embodiments, a T cell population is DGK-deficient and Ikaros-deficient, e.g., does not express DGK and Ikaros, or has reduced or inhibited DGK and Ikaros activity. Such DGK and Ikaros-deficient cells can be generated by any of the methods described herein.

[0839] In an embodiment, the NK cells are obtained from the subject. In another embodiment, the NK cells are an NK cell line, e.g., NK-92 cell line (Conkwest).

[0840] Allogeneic CAR

[0841] In embodiments described herein, the immune effector cell can be an allogeneic immune effector cell, e.g., T cell or NK cell. For example, the cell can be an allogeneic T cell, e.g., an allogeneic T cell lacking expression of a functional T cell receptor (TCR) and/or human leukocyte antigen (HLA), e.g., HLA class I and/or HLA class II.

[0842] A T cell lacking a functional TCR can be, e.g., engineered such that it does not express any functional TCR on its surface, engineered such that it does not express one or more subunits that comprise a functional TCR (e.g., engineered such that it does not express (or exhibits reduced expression) of TCR alpha, TCR beta, TCR gamma, TCR delta, TCR epsilon, and/or TCR zeta) or engineered such that it produces very little functional TCR on its surface (e.g., engineered such that it does not express (or exhibits reduced expression) of TCR alpha, TCR beta, TCR gamma, TCR delta, TCR epsilon, and/or TCR zeta). Alternatively, the T cell can express a substantially impaired TCR, e.g., by expression of mutated or truncated forms of one or more of the subunits of the TCR. The term “substantially impaired TCR” means that this TCR will not elicit an adverse immune reaction in a host.

[0843] A T cell described herein can be, e.g., engineered such that it does not express a functional HLA on its surface. For example, a T cell described herein, can be engineered such that cell surface expression HLA, e.g., HLA class 1 and/or HLA class II, is downregulated. In some embodiments, downregulation of HLA may be accomplished by reducing or eliminating expression of beta-2 microglobulin (B2M).

[0844] In some embodiments, the T cell can lack a functional TCR and a functional HLA, e.g., HLA class I and/or HLA class II.

[0845] Modified T cells that lack expression of a functional TCR and/or HLA can be obtained by any suitable means, including a knock out or knock down of one or more subunit of TCR or HLA. For example, the T cell can include a knock down of TCR and/or HLA using siRNA, shRNA, clustered regularly interspaced short palindromic repeats (CRISPR) transcription-activator like effector nuclease (TALEN), or zinc finger endonuclease (ZFN).

[0846] In some embodiments, the allogeneic cell can be a cell which does not express or expresses at low levels an inhibitory molecule, e.g. a cell engineered by any method described herein. For example, the cell can be a cell that does not express or expresses at low levels an inhibitory molecule, e.g., that can decrease the ability of a CAR-expressing cell to mount an immune effector response. Examples of inhibitory molecules include PD1, PD-L1, PD-L2, CTLA4, TIM3, CEACAM (e.g., CEACAM-1, CEACAM-3 and/or CEACAM-5), LAG3, VISTA, BTLA, TIGIT, LAIR1, CD160, 2B4, CD80, CD86, B7-H3 (CD276), B7-H4 (VTCN1), HVEM (TNFRSF14 or CD270), KIR, A2aR, MHC class I, MHC class II, GAL9, adenosine, and TGFR (e.g., TGFR beta). Inhibition of an inhibitory molecule, e.g., by inhibition at the DNA, RNA or protein level, can optimize a CAR-expressing cell performance. In embodiments, an inhibitory nucleic acid, e.g., an inhibitory nucleic acid, e.g., a dsRNA, e.g., an siRNA or shRNA, a clustered regularly interspaced short palindromic repeats (CRISPR), a transcription-activator like effector nuclease (TALEN), or a zinc finger endonuclease (ZFN), e.g., as described herein, can be used.

[0847] siRNA and shRNA to Inhibit TCR or HLA

[0848] In some embodiments, TCR expression and/or HLA expression can be inhibited using siRNA or shRNA that targets a nucleic acid encoding a TCR and/or HLA, and/or an inhibitory molecule described herein (e.g., PD1, PD-L1, PD-L2, CTLA4, TIM3, CEACAM (e.g., CEACAM-1, CEACAM-3 and/or CEACAM-5), LAG3, VISTA, BTLA, TIGIT, LAIR1, CD160, 2B4, CD80, CD86, B7-H3 (CD276), B7-H4 (VTCN1), HVEM (TNFRSF14 or CD270), KIR, A2aR, MHC class I, MHC class II, GAL9, adenosine, and TGFR beta), in a T cell.

[0849] Expression systems for siRNA and shRNAs, and exemplary shRNAs, are described, e.g., in paragraphs 649 and 650 of International Application WO2015/142675, filed Mar. 13, 2015, which is incorporated by reference in its entirety

[0850] CRISPR to Inhibit TCR or HLA

[0851] “CRISPR” or “CRISPR to TCR and/or HLA” or “CRISPR to inhibit TCR and/or HLA” as used herein refers to a set of clustered regularly interspaced short palindromic repeats, or a system comprising such a set of repeats. “Cas”, as used herein, refers to a CRISPR-associated protein. A “CRISPR/Cas” system refers to a system derived from CRISPR and Cas which can be used to silence or mutate a TCR and/or HLA gene, and/or an inhibitory molecule described herein (e.g., PD1, PD-L1, PD-L2, CTLA4, TIM3, CEACAM (e.g., CEACAM-1, CEACAM-3 and/or CEACAM-5), LAG3, VISTA, BTLA, TIGIT, LAIR1, CD160, 2B4, CD80, CD86, B7-H3 (CD276), B7-H4 (VTCN1), HVEM (TNFRSF14 or CD270), KIR, A2aR, MHC class I, MHC class II, GAL9, adenosine, and TGFR beta).

[0852] The CRISPR/Cas system, and uses thereof, are described, e.g., in paragraphs 651-658 of International Application WO2015/142675, filed Mar. 13, 2015, which is incorporated by reference in its entirety.

[0853] TALEN to Inhibit TCR and/or HLA

[0854] “TALEN” or “TALEN to HLA and/or TCR” or “TALEN to inhibit HLA and/or TCR” refers to a transcription activator-like effector nuclease, an artificial nuclease which can be used to edit the HLA and/or TCR gene, and/or an inhibitory molecule described herein (e.g., PD1, PD-L1, PD-L2, CTLA4, TIM3, CEACAM (e.g., CEACAM-1, CEACAM-3 and/or CEACAM-5), LAG3, VISTA, BTLA, TIGIT, LAIR1, CD160, 2B4, CD80, CD86, B7-H3 (CD276), B7-H4 (VTCN1), HVEM (TNFRSF14 or CD270), KIR, A2aR, WIC class I, WIC class II, GAL9, adenosine, and TGFR beta).

[0855] TALENs, TALEs, and uses thereof, are described, e.g., in paragraphs 659-665 of International Application WO2015/142675, filed Mar. 13, 2015, which is incorporated by reference in its entirety.

[0856] Zinc Finger Nuclease to Inhibit HLA and/or TCR

[0857] “ZFN” or “Zinc Finger Nuclease” or “ZFN to HLA and/or TCR” or “ZFN to inhibit HLA and/or TCR” refer to a zinc finger nuclease, an artificial nuclease which can be used to edit the HLA and/or TCR gene, and/or an inhibitory molecule described herein (e.g., PD1, PD-L1, PD-L2, CTLA4, TIM3, CEACAM (e.g., CEACAM-1, CEACAM-3 and/or CEACAM-5), LAG3, VISTA, BTLA, TIGIT, LAIR1, CD160, 2B4, CD80, CD86, B7-H3 (CD276), B7-H4 (VTCN1), HVEM (TNFRSF14 or CD270), KIR, A2aR, WIC class I, MHC class II, GAL9, adenosine, and TGFR beta).

ZFNs, and uses thereof, are described, e.g., in paragraphs 666-671 of International Application WO2015/142675, filed Mar. 13, 2015, which is incorporated by reference in its entirety.

### Telomerase Expression

[0858] While not wishing to be bound by any particular theory, in some embodiments, a therapeutic T cell has short term persistence in a patient, due to shortened telomeres in the T cell; accordingly, transfection with a telomerase gene can lengthen the telomeres of the T cell and improve persistence of the T cell in the patient. See Carl June, “Adoptive T cell therapy for cancer in the clinic”, Journal of Clinical Investigation, 117:1466-1476 (2007). Thus, in an embodiment, an immune effector cell, e.g., a T cell, ectopically expresses a telomerase subunit, e.g., the catalytic subunit of telomerase, e.g., TERT, e.g., hTERT. In some aspects, this disclosure provides a method of producing a CAR-expressing cell, comprising contacting a cell with a nucleic acid encoding a telomerase subunit, e.g., the catalytic subunit of telomerase, e.g., TERT, e.g., hTERT. The cell may be contacted with the nucleic acid before, simultaneous with, or after being contacted with a construct encoding a CAR.

[0859] In one aspect, the disclosure features a method of making a population of immune effector cells (e.g., T cells or NK cells). In an embodiment, the method comprises: providing a population of immune effector cells (e.g., T cells or NK cells), contacting the population of immune effector cells with a nucleic acid encoding a CAR; and contacting the population of immune effector cells with a nucleic acid encoding a telomerase subunit, e.g., hTERT, under conditions that allow for CAR and telomerase expression.

[0860] In an embodiment, the nucleic acid encoding the telomerase subunit is DNA. In an embodiment, the nucleic acid encoding the telomerase subunit comprises a promoter capable of driving expression of the telomerase subunit.

[0861] In an embodiment, hTERT has the amino acid sequence of GenBank Protein ID AAC51724.1 (Meyerson et al., “hEST2, the Putative Human Telomerase Catalytic Subunit Gene, Is Up-Regulated in Tumor Cells and during Immortalization” Cell Volume 90, Issue 4, 22 Aug. 1997, Pages 785-795) as follows:

(SEQ ID NO: 1332)
[sequence omitted]

[0862] In an embodiment, the hTERT has a sequence at least 80%, 85%, 90%, 95%, 96\hat{ }, 97%, 98%, or 99% identical to the sequence of SEQ ID NO: 1332. In an embodiment, the hTERT has a sequence of SEQ ID NO: 1332. In an embodiment, the hTERT comprises a deletion (e.g., of no more than 5, 10, 15, 20, or 30 amino acids) at the N-terminus, the C-terminus, or both. In an embodiment, the hTERT comprises a transgenic amino acid sequence (e.g., of no more than 5, 10, 15, 20, or 30 amino acids) at the N-terminus, the C-terminus, or both.

[0863] In an embodiment, the hTERT is encoded by the nucleic acid sequence of GenBank Accession No. AF018167 (Meyerson et al., “hEST2, the Putative Human Telomerase Catalytic Subunit Gene, Is Up-Regulated in Tumor Cells and during Immortalization” Cell Volume 90, Issue 4, 22 Aug. 1997, Pages 785-795):

| (SEQ ID NO: 1333) | |
|---|---|
| 1 | caggcagcgt ggtcctgctg cgcacgtggg aagccctggc cccggccacc cccgcgatgc |
| 61 | cgcgcgctcc ccgctgccga gccgtgcgct ccctgctgcg cagccactac cgcgaggtgc |
| 121 | tgccgctggc cacgttcgtg cggcgcctgg ggccccaggg ctggcggctg gtgcagcgcg |
| 181 | gggacccggc ggctttccgc gcgctggtgg cccagtgcct ggtgtgcgtg ccctgggacg |
| 241 | cacggccgcc ccccgccgcc ccctccttcc gccaggtgtc ctgcctgaag gagctggtgg |
| 301 | cccgagtgct gcagaggctg tgcgagcgcg gcgcgaagaa cgtgctggcc ttcggcttcg |
| 361 | cgctgctgga cggggcccgc gggggccccc ccgaggcctt caccaccagc gtgcgcagct |
| 421 | acctgcccaa cacggtgacc gacgcactgc gggggagcgg ggcgtggggg ctgctgttgc |
| 481 | gccgcgtggg cgacgacgtg ctggttcacc tgctggcacg ctgcgcgctc tttgtgctgg |
| 541 | tggctcccag ctgcgcctac caggtgtgcg ggccgccgct gtaccagctc ggcgctgcca |
| 601 | ctcaggcccg gcccccgcca cacgctagtg gaccccgaag gcgtctggga tgcgaacggg |
| 661 | cctggaacca tagcgtcagg gaggccgggg tccccctggg cctgccagcc ccgggtgcga |
| 721 | ggaggcgcgg gggcagtgcc agccgaagtc tgccgttgcc caagaggccc aggcgtggcg |
| 781 | ctgcccctga gccggagcgg acgcccgttg ggcaggggtc ctgggcccac ccgggcagga |
| 841 | cgcgtggacc gagtgaccgt ggtttctgtg tggtgtcacc tgccagaccc gccgaagaag |
| 901 | ccacctcttt ggagggtgcg ctctctggca cgcgccactc ccacccatcc gtgggccgcc |
| 961 | agcaccacgc gggcccccca tccacatcgc ggccaccacg tccctgggac acgccttgtc |
| 1021 | ccccggtgta cgccgagacc aagcacttcc tctactcctc aggcgacaag gagcagctgc |
| 1081 | ggccctcctt cctactcagc tctctgaggc ccagcctgac tggcgctcgg aggctcgtgg |
| 1141 | agaccatctt tctgggttcc aggccctgga tgccagggac tccccgcagg ttgccccgcc |
| 1201 | tgccccagcg ctactggcaa atgcggcccc tgtttctgga gctgcttggg aaccacgcgc |
| 1261 | agtgccccta cggggtgctc ctcaagacgc actgcccgct gcgagctgcg gtcaccccag |
| 1321 | cagccggtgt ctgtgcccgg gagaagcccc agggctctgt ggcggccccc gaggaggagg |
| 1381 | acacagaccc ccgtcgcctg gtgcagctgc tccgccagca cagcagcccc tggcaggtgt |
| 1441 | acggcttcgt gcgggcctgc ctgcgccggc tggtgccccc aggcctctgg ggctccaggc |
| 1501 | acaacgaacg ccgcttcctc aggaacacca agaagttcat ctccctgggg aagcatgcca |
| 1561 | agctctcgct gcaggagctg acgtggaaga tgagcgtgcg gggctgcgct tggctgcgca |
| 1621 | ggagcccagg ggttggctgt gttccggccg cagagcaccg tctgcgtgag gagatcctgg |
| 1681 | ccaagttcct gcactggctg atgagtgtgt acgtcgtcga gctgctcagg tctttctttt |
| 1741 | atgtcacgga gaccacgttt caaaagaaca ggctcttttt ctaccggaag agtgtctgga |
| 1801 | gcaagttgca aagcattgga atcagacagc acttgaagag ggtgcagctg cgggagctgt |
| 1861 | cggaagcaga ggtcaggcag catcgggaag ccaggcccgc cctgctgacg tccagactcc |
| 1921 | gcttcatccc caagcctgac gggctgcggc cgattgtgaa catggactac gtcgtgggag |
| 1981 | ccagaacgtt ccgcagagaa aagagggccg agcgtctcac ctcgagggtg aaggcactgt |
| 2041 | tcagcgtgct caactacgag cgggcgcggc gccccggcct cctgggcgcc tctgtgctgg |
| 2101 | gcctggacga tatccacagg gcctggcgca ccttcgtgct gcgtgtgcgg gcccaggacc |
| 2161 | cgccgcctga gctgtacttt gtcaaggtgg atgtgacggg cgcgtacgac accatccccc |
| 2221 | aggacaggct cacggaggtc atcgccagca tcatcaaacc ccagaacacg tactgcgtgc |
| 2281 | gtcggtatgc cgtggtccag aaggccgccc atgggcacgt ccgcaaggcc ttcaagagcc |
| 2341 | acgtctctac cttgacagac ctccagccgt acatgcgaca gttcgtggct cacctgcagg |
| 2401 | agaccagccc gctgagggat gccgtcgtca tcgagcagag ctcctccctg aatgaggcca |
| 2461 | gcagtggcct cttcgacgtc ttcctacgct tcatgtgcca ccacgccgtg cgcatcaggg |
| 2521 | gcaagtccta cgtccagtgc caggggatcc cgcagggctc catcctctcc acgctgctct |
| 2581 | gcagcctgtg ctacggcgac atggagaaca agctgtttgc ggggattcgg cgggacgggc |
| 2641 | tgctcctgcg tttggtggat gatttcttgt tggtgacacc tcacctcacc cacgcgaaaa |
| 2701 | ccttcctcag gaccctggtc cgaggtgtcc ctgagtatgg ctgcgtggtg aacttgcgga |
| 2761 | agacagtggt gaacttccct gtagaagacg aggccctggg tggcacggct tttgttcaga |
| 2821 | tgccggccca cggcctattc ccctggtgcg gcctgctgct ggatacccgg accctggagg |
| 2881 | tgcagagcga ctactccagc tatgcccgga cctccatcag agccagtctc accttcaacc |
| 2941 | gcggcttcaa ggctgggagg aacatgcgtc gcaaactctt tggggtcttg cggctgaagt |
| 3001 | gtcacagcct gtttctggat ttgcaggtga acagcctcca gacggtgtgc accaacatct |
| 3061 | acaagatcct cctgctgcag gcgtacaggt ttcacgcatg tgtgctgcag ctcccatttc |
| 3121 | atcagcaagt ttggaagaac cccacatttt tcctgcgcgt catctctgac acggcctccc |
| 3181 | tctgctactc catcctgaaa gccaagaacg cagggatgtc gctgggggcc aagggcgccg |
| 3241 | ccggccctct gccctccgag gccgtgcagt ggctgtgcca ccaagcattc ctgctcaagc |
| 3301 | tgactcgaca ccgtgtcacc tacgtgccac tcctggggtc actcaggaca gcccagacgc |
| 3361 | agctgagtcg gaagctcccg gggacgacgc tgactgccct ggaggccgca gccaacccgg |
| 3421 | cactgccctc agacttcaag accatcctgg actgatggcc acccgcccac agccaggccg |
| 3481 | agagcagaca ccagcagccc tgtcacgccg ggctctacgt cccagggagg gaggggcggc |
| 3541 | ccacacccag gcccgcaccg ctgggagtct gaggcctgag tgagtgtttg gccgaggcct |
| 3601 | gcatgtccgg ctgaaggctg agtgtccggc tgaggcctga gcgagtgtcc agccaagggc |
| 3661 | tgagtgtcca gcacacctgc cgtcttcact tccccacagg ctggcgctcg gctccacccc |
| 3721 | agggccagct tttcctcacc aggagcccgg cttccactcc ccacatagga atagtccatc |
| 3781 | cccagattcg ccattgttca cccctcgccc tgccctcctt tgccttccac ccccaccatc |
| 3841 | caggtggaga ccctgagaag gaccctggga gctctgggaa tttggagtga ccaaaggtgt |
| 3901 | gccctgtaca caggcgagga ccctgcacct ggatgggggt ccctgtgggt caaattgggg |
| 3961 | ggaggtgctg tgggagtaaa atactgaata tatgagtttt tcagttttga aaaaaaaaaa |
| 4021 | aaaaaaa |

[0864] In an embodiment, the hTERT is encoded by a nucleic acid having a sequence at least 80%, 85%, 90%, 95%, 96, 97%, 98%, or 99% identical to the sequence of SEQ ID NO: 1333. In an embodiment, the hTERT is encoded by a nucleic acid of SEQ ID NO: 1333.

### Activation and Expansion of Immune Effector Cells (e.g., T Cells)

[0865] Immune effector cells such as T cells may be activated and expanded generally using methods as described, for example, in U.S. Pat. Nos. 6,352,694; 6,534,055; 6,905,680; 6,692,964; 5,858,358; 6,887,466; 6,905,681; 7,144,575; 7,067,318; 7,172,869; 7,232,566; 7,175,843; 5,883,223; 6,905,874; 6,797,514; 6,867,041; and U.S. Patent Application Publication No. 20060121005.

[0866] The procedure for ex vivo expansion of hematopoietic stem and progenitor cells is described in U.S. Pat. No. 5,199,942, incorporated herein by reference, can be applied to the cells of the present invention. Other suitable methods are known in the art, therefore the present invention is not limited to any particular method of ex vivo expansion of the cells. Briefly, ex vivo culture and expansion of T cells can comprise: (1) collecting CD34+ hematopoietic stem and progenitor cells from a mammal from peripheral blood harvest or bone marrow explants; and (2) expanding such cells ex vivo. In addition to the cellular growth factors described in U.S. Pat. No. 5,199,942, other factors such as flt3-L, IL-1, IL-3 and c-kit ligand, can be used for culturing and expansion of the cells.

[0867] Generally, a population of immune effector cells may be expanded by contact with a surface having attached thereto an agent that stimulates a CD3/TCR complex associated signal and a ligand that stimulates a costimulatory molecule on the surface of the T cells. In particular, T cell populations may be stimulated as described herein, such as by contact with an anti-CD3 antibody, or antigen-binding fragment thereof, or an anti-CD2 antibody immobilized on a surface, or by contact with a protein kinase C activator (e.g., bryostatin) in conjunction with a calcium ionophore. For co-stimulation of an accessory molecule on the surface of the T cells, a ligand that binds the accessory molecule is used. For example, a population of T cells can be contacted with an anti-CD3 antibody and an anti-CD28 antibody, under conditions appropriate for stimulating proliferation of the T cells. To stimulate proliferation of either CD4+ T cells or CD8+ T cells, an anti-CD3 antibody and an anti-CD28 antibody may be used. Examples of an anti-CD28 antibody include 9.3, B-T3, XR-CD28 (Diaclone, Besancon, France) can be used as can other methods commonly known in the art (Berg et al., Transplant Proc. 30(8):3975-3977, 1998; Haanen et al., J. Exp. Med. 190(9):13191328, 1999; Garland et al., J. Immunol Meth. 227(1-2):53-63, 1999).

[0868] In some embodiments, immune effector cells (such as PBMCs or T cells) are expanded and stimulated by contacting the cells to one or both of an anti-CD3 antibody and IL-2. In embodiments, the cells are expanded without anti-CD3 or anti-CD28 beads.

[0869] In certain aspects, the primary stimulatory signal and the costimulatory signal for the T cell may be provided by different protocols. For example, the agents providing each signal may be in solution or coupled to a surface. When coupled to a surface, the agents may be coupled to the same surface (i.e., in “cis” formation) or to separate surfaces (i.e., in “trans” formation). Alternatively, one agent may be coupled to a surface and the other agent in solution. In one aspect, the agent providing the costimulatory signal is bound to a cell surface and the agent providing the primary activation signal is in solution or coupled to a surface. In certain aspects, both agents can be in solution. In one aspect, the agents may be in soluble form, and then cross-linked to a surface, such as a cell expressing Fc receptors or an antibody or other binding agent which will bind to the agents. In this regard, see for example, U.S. Patent Application Publication Nos. 20040101519 and 20060034810 for artificial antigen presenting cells (aAPCs) that are contemplated for use in activating and expanding T cells in the present invention.

[0870] In one aspect, the two agents are immobilized on beads, either on the same bead, i.e., “cis,” or to separate beads, i.e., “trans.” By way of example, the agent providing the primary activation signal is an anti-CD3 antibody or an antigen-binding fragment thereof and the agent providing the costimulatory signal is an anti-CD28 antibody or antigen-binding fragment thereof; and both agents are co-immobilized to the same bead in equivalent molecular amounts. In one aspect, a 1:1 ratio of each antibody bound to the beads for CD4+ T cell expansion and T cell growth is used. In certain aspects, a ratio of anti CD3:CD28 antibodies bound to the beads is used such that an increase in T cell expansion is observed as compared to the expansion observed using a ratio of 1:1. In one particular aspect an increase of from about 1 to about 3 fold is observed as compared to the expansion observed using a ratio of 1:1. In one aspect, the ratio of CD3:CD28 antibody bound to the beads ranges from 100:1 to 1:100 and all integer values there between. In one aspect, more anti-CD28 antibody is bound to the particles than anti-CD3 antibody, i.e., the ratio of CD3:CD28 is less than one. In certain aspects, the ratio of anti CD28 antibody to anti CD3 antibody bound to the beads is greater than 2:1. In one particular aspect, a 1:100 CD3:CD28 ratio of antibody bound to beads is used. In one aspect, a 1:75 CD3:CD28 ratio of antibody bound to beads is used. In a further aspect, a 1:50 CD3:CD28 ratio of antibody bound to beads is used. In one aspect, a 1:30 CD3:CD28 ratio of antibody bound to beads is used. In one aspect, a 1:10 CD3:CD28 ratio of antibody bound to beads is used. In one aspect, a 1:3 CD3:CD28 ratio of antibody bound to the beads is used. In yet one aspect, a 3:1 CD3:CD28 ratio of antibody bound to the beads is used.

[0871] Ratios of particles to cells from 1:500 to 500:1 and any integer values in between may be used to stimulate T cells or other target cells. As those of ordinary skill in the art can readily appreciate, the ratio of particles to cells may depend on particle size relative to the target cell. For example, small sized beads could only bind a few cells, while larger beads could bind many. In certain aspects the ratio of cells to particles ranges from 1:100 to 100:1 and any integer values in-between and in further aspects the ratio comprises 1:9 to 9:1 and any integer values in between, can also be used to stimulate T cells. The ratio of anti-CD3- and anti-CD28-coupled particles to T cells that result in T cell stimulation can vary as noted above, however certain suitable values include 1:100, 1:50, 1:40, 1:30, 1:20, 1:10, 1:9, 1:8, 1:7, 1:6, 1:5, 1:4, 1:3, 1:2, 1:1, 2:1, 3:1, 4:1, 5:1, 6:1, 7:1, 8:1, 9:1, 10:1, and 15:1 with one suitable ratio being at least 1:1 particles per T cell. In one aspect, a ratio of particles to cells of 1:1 or less is used. In one particular aspect, a suitable particle: cell ratio is 1:5. In further aspects, the ratio of particles to cells can be varied depending on the day of stimulation. For example, in one aspect, the ratio of particles to cells is from 1:1 to 10:1 on the first day and additional particles are added to the cells every day or every other day thereafter for up to 10 days, at final ratios of from 1:1 to 1:10 (based on cell counts on the day of addition). In one particular aspect, the ratio of particles to cells is 1:1 on the first day of stimulation and adjusted to 1:5 on the third and fifth days of stimulation. In one aspect, particles are added on a daily or every other day basis to a final ratio of 1:1 on the first day, and 1:5 on the third and fifth days of stimulation. In one aspect, the ratio of particles to cells is 2:1 on the first day of stimulation and adjusted to 1:10 on the third and fifth days of stimulation. In one aspect, particles are added on a daily or every other day basis to a final ratio of 1:1 on the first day, and 1:10 on the third and fifth days of stimulation. One of skill in the art will appreciate that a variety of other ratios may be suitable for use in the present invention. In particular, ratios will vary depending on particle size and on cell size and type. In one aspect, the most typical ratios for use are in the neighborhood of 1:1, 2:1 and 3:1 on the first day.

[0872] In further aspects of the present invention, the cells, such as T cells, are combined with agent-coated beads, the beads and the cells are subsequently separated, and then the cells are cultured. In an alternative aspect, prior to culture, the agent-coated beads and cells are not separated but are cultured together. In a further aspect, the beads and cells are first concentrated by application of a force, such as a magnetic force, resulting in increased ligation of cell surface markers, thereby inducing cell stimulation.

[0873] By way of example, cell surface proteins may be ligated by allowing paramagnetic beads to which anti-CD3 and anti-CD28 are attached (3×28 beads) to contact the T cells. In one aspect the cells (for example, 10⁴ to 10⁹ T cells) and beads (for example, DYNABEADS® M-450 CD3/CD28 T paramagnetic beads at a ratio of 1:1) are combined in a buffer, for example PBS (without divalent cations such as, calcium and magnesium). Again, those of ordinary skill in the art can readily appreciate any cell concentration may be used. For example, the target cell may be very rare in the sample and comprise only 0.01% of the sample or the entire sample (i.e., 100%) may comprise the target cell of interest. Accordingly, any cell number is within the context of the present invention. In certain aspects, it may be desirable to significantly decrease the volume in which particles and cells are mixed together (i.e., increase the concentration of cells), to ensure maximum contact of cells and particles. For example, in one aspect, a concentration of about 10 billion cells/ml, 9 billion/ml, 8 billion/ml, 7 billion/ml, 6 billion/ml, or 5 billion/ml or 2 billion cells/ml is used. In one aspect, greater than 100 million cells/ml is used. In a further aspect, a concentration of cells of 10, 15, 20, 25, 30, 35, 40, 45, or 50 million cells/ml is used. In yet one aspect, a concentration of cells from 75, 80, 85, 90, 95, or 100 million cells/ml is used. In further aspects, concentrations of 125 or 150 million cells/ml can be used. Using high concentrations can result in increased cell yield, cell activation, and cell expansion. Further, use of high cell concentrations allows more efficient capture of cells that may weakly express target antigens of interest, such as CD28-negative T cells. Such populations of cells may have therapeutic value and would be desirable to obtain in certain aspects. For example, using high concentration of cells allows more efficient selection of CD8+ T cells that normally have weaker CD28 expression.

[0874] In one embodiment, cells transduced with a nucleic acid encoding a CAR, e.g., a CAR described herein, are expanded, e.g., by a method described herein. In one embodiment, the cells are expanded in culture for a period of several hours (e.g., about 2, 3, 4, 5, 6, 7, 8, 9, 10, 15, 18, 21 hours) to about 14 days (e.g., 1, 2, 3, 4, 5, 6, 7, 8, 9, 10, 11, 12, 13 or 14 days). In one embodiment, the cells are expanded for a period of 4 to 9 days. In one embodiment, the cells are expanded for a period of 8 days or less, e.g., 7, 6 or 5 days. In one embodiment, the cells, e.g., a CAR cell described herein, are expanded in culture for 5 days, and the resulting cells are more potent than the same cells expanded in culture for 9 days under the same culture conditions. Potency can be defined, e.g., by various T cell functions, e.g. proliferation, target cell killing, cytokine production, activation, migration, or combinations thereof. In one embodiment, the cells, e.g., a CD19 CAR cell described herein, expanded for 5 days show at least a one, two, three or four fold increase in cells doublings upon antigen stimulation as compared to the same cells expanded in culture for 9 days under the same culture conditions. In one embodiment, the cells, e.g., the cells expressing a CAR described herein, are expanded in culture for 5 days, and the resulting cells exhibit higher proinflammatory cytokine production, e.g., IFN-γ and/or GM-CSF levels, as compared to the same cells expanded in culture for 9 days under the same culture conditions. In one embodiment, the cells, e.g., a CAR cell described herein, expanded for 5 days show at least a one, two, three, four, five, ten fold or more increase in pg/ml of proinflammatory cytokine production, e.g., IFN-γ and/or GM-CSF levels, as compared to the same cells expanded in culture for 9 days under the same culture conditions.

[0875] In one aspect of the present invention, the mixture may be cultured for several hours (about 3 hours) to about 14 days or any hourly integer value in between. In one aspect, the mixture may be cultured for 21 days. In one aspect of the invention the beads and the T cells are cultured together for about eight days. In one aspect, the beads and T cells are cultured together for 2-3 days.

[0876] Several cycles of stimulation may also be desired such that culture time of T cells can be 60 days or more. Conditions appropriate for T cell culture include an appropriate media (e.g., Minimal Essential Media or RPMI Media 1640 or, X-vivo 15, (Lonza)) that may contain factors necessary for proliferation and viability, including serum (e.g., fetal bovine or human serum), interleukin-2 (IL-2), insulin, IFN-γ, IL-4, IL-7, GM-CSF, IL-10, IL-12, IL-15, TGFβ, and TNF-α or any other additives for the growth of cells known to the skilled artisan. Other additives for the growth of cells include, but are not limited to, surfactant, plasmanate, and reducing agents such as N-acetyl-cysteine and 2-mercaptoethanol. Media can include RPMI 1640, AIM-V, DMEM, MEM, α-MEM, F-12, X-Vivo 15, and X-Vivo 20, Optimizer, with added amino acids, sodium pyruvate, and vitamins, either serum-free or supplemented with an appropriate amount of serum (or plasma) or a defined set of hormones, and/or an amount of cytokine(s) sufficient for the growth and expansion of T cells. Antibiotics, e.g., penicillin and streptomycin, are included only in experimental cultures, not in cultures of cells that are to be infused into a subject. The target cells are maintained under conditions necessary to support growth, for example, an appropriate temperature (e.g., 37° C.) and atmosphere (e.g., air plus 5% CO₂).

[0877] In one embodiment, the cells are expanded in an appropriate media (e.g., media described herein) that includes one or more interleukin that result in at least a 200-fold (e.g., 200-fold, 250-fold, 300-fold, 350-fold) increase in cells over a 14 day expansion period, e.g., as measured by a method described herein such as flow cytometry. In one embodiment, the cells are expanded in the presence IL-15 and/or IL-7 (e.g., IL-15 and IL-7).

[0878] In some embodiments a CAR-expressing cell described herein (e.g., a T cell such as a CD4+ T cell or a CD8+ T cell) is contacted with a composition comprising a interleukin-15 (IL-15) polypeptide, a interleukin-15 receptor alpha (IL-15Ra) polypeptide, or a combination of both a IL-15 polypeptide and a IL-15Ra polypeptide e.g., hetIL-15, during the manufacturing of the CAR-expressing cell, e.g., ex vivo. In embodiments, a CAR-expressing cell described herein is contacted with a composition comprising a IL-15 polypeptide during the manufacturing of the CAR-expressing cell, e.g., ex vivo. In embodiments, a CAR-expressing cell described herein is contacted with a composition comprising a combination of both a IL-15 polypeptide and a IL-15 Ra polypeptide during the manufacturing of the CAR-expressing cell, e.g., ex vivo. In embodiments, a CAR-expressing cell described herein is contacted with a composition comprising hetIL-15 during the manufacturing of the CAR-expressing cell, e.g., ex vivo.

[0879] In one embodiment the CAR-expressing cell (e.g., a T cell or NK cell) described herein is contacted with a composition comprising hetIL-15 during ex vivo expansion. In an embodiment, the CAR-expressing cell described herein is contacted with a composition comprising an IL-15 polypeptide during ex vivo expansion. In an embodiment, the CAR-expressing cell described herein is contacted with a composition comprising both an IL-15 polypeptide and an IL-15Ra polypeptide during ex vivo expansion. In one embodiment the contacting results in the survival and proliferation of a lymphocyte subpopulation, e.g., CD8+ T cells.

[0880] In an embodiments, the method of making disclosed herein further comprises contacting the population of immune effector cells (e.g., T cells or NK cells) with a nucleic acid encoding a telomerase subunit, e.g., hTERT. The nucleic acid encoding the telomerase subunit can be DNA.

[0881] T cells that have been exposed to varied stimulation times may exhibit different characteristics. For example, typical blood or apheresed peripheral blood mononuclear cell products have a helper T cell population (TH, CD4+) that is greater than the cytotoxic or suppressor T cell population (TC, CD8+). Ex vivo expansion of T cells by stimulating CD3 and CD28 receptors produces a population of T cells that prior to about days 8-9 consists predominately of TH cells, while after about days 8-9, the population of T cells comprises an increasingly greater population of TC cells. Accordingly, depending on the purpose of treatment, infusing a subject with a T cell population comprising predominately of TH cells may be advantageous. Similarly, if an antigen-specific subset of TC cells has been isolated it may be beneficial to expand this subset to a greater degree.

[0882] Further, in addition to CD4 and CD8 markers, other phenotypic markers vary significantly, but in large part, reproducibly during the course of the cell expansion process. Thus, such reproducibility enables the ability to tailor an activated T cell product for specific purposes.

[0883] Once a CAR, e.g., CD19 CAR is constructed, various assays can be used to evaluate the activity of the molecule, such as but not limited to, the ability to expand T cells following antigen stimulation, sustain T cell expansion in the absence of re-stimulation, and anti-cancer activities in appropriate in vitro and animal models. Assays to evaluate the effects of a CAR, e.g., CD19 CAR are described in further detail below

[0884] Western blot analysis of CAR expression in primary T cells can be used to detect the presence of monomers and dimers, e.g., as described in paragraph 695 of International Application WO2015/142675, filed Mar. 13, 2015, which is herein incorporated by reference in its entirety.

[0885] In vitro expansion of CAR⁺ T cells following antigen stimulation can be measured by flow cytometry. For example, a mixture of CD4⁺ and CD8⁺ T cells are stimulated with αCD3/αCD28 beads followed by transduction with lentiviral vectors expressing GFP under the control of the promoters to be analyzed. Exemplary promoters include the CMV IE gene, EF-1α, ubiquitin C, or phosphoglycerokinase (PGK) promoters. GFP fluorescence is evaluated on day 6 of culture in the CD4⁺ and/or CD8⁺ T cell subsets by flow cytometry. See, e.g., Milone et al., Molecular Therapy 17(8): 1453-1464 (2009). Alternatively, a mixture of CD4⁺ and CD8⁺ T cells are stimulated with αCD3/αCD28 coated magnetic beads on day 0, and transduced with CAR on day 1 using a bicistronic lentiviral vector expressing CAR along with eGFP using a 2A ribosomal skipping sequence. Cultures are re-stimulated with either CD19⁺ K562 cells (K562-CD19), wild-type K562 cells (K562 wild type) or K562 cells expressing hCD32 and 4-1BBL in the presence of anti-CD3 and anti-CD28 antibody (K562-BBL-3/28) following washing. Exogenous IL-2 is added to the cultures every other day at 100 IU/ml. GFP⁺ T cells are enumerated by flow cytometry using bead-based counting. See, e.g., Milone et al., Molecular Therapy 17(8): 1453-1464 (2009).

[0886] Sustained CAR⁺ T cell expansion in the absence of re-stimulation can also be measured. See, e.g., Milone et al., Molecular Therapy 17(8): 1453-1464 (2009). Briefly, mean T cell volume (fl) is measured on day 8 of culture using a Coulter Multisizer particle counter, a Nexcelom Cellometer Vision, or Millipore Scepter following stimulation with αCD3/αCD28 coated magnetic beads on day 0, and transduction with the indicated CAR on day 1.

[0887] Animal models can also be used to measure a CAR-expressing cell activity, e.g., as described in paragraph 698 of International Application WO2015/142675, filed Mar. 13, 2015, which is herein incorporated by reference in its entirety.

[0888] Dose dependent CAR treatment response can be evaluated, e.g., as described in paragraph 699 of International Application WO2015/142675, filed Mar. 13, 2015, which is herein incorporated by reference in its entirety. Assessment of cell proliferation and cytokine production has been previously described, e.g., as described in paragraph 700 of International Application WO2015/142675, filed Mar. 13, 2015, which is herein incorporated by reference in its entirety. Cytotoxicity can be assessed by a standard ⁵¹Cr-release assay, e.g., as described in paragraph 701 of International Application WO2015/142675, filed Mar. 13, 2015, which is herein incorporated by reference in its entirety. Imaging technologies can be used to evaluate specific trafficking and proliferation of CARs in tumor-bearing animal models, e.g., as described in paragraph 702 of International Application WO2015/142675, filed Mar. 13, 2015, which is herein incorporated by reference in its entirety.

[0889] Other assays, including those described in the Example section herein as well as those that are known in the art can also be used to evaluate the CARs described herein.

[0890] Alternatively, or in combination to the methods disclosed herein, methods and compositions for one or more of detection and/or quantification of CAR-expressing cells (e.g., in vitro or in vivo (e.g., clinical monitoring)), immune cell expansion and/or activation, and/or CAR-specific selection, that involve the use of a CAR ligand, are disclosed. In one exemplary embodiment, the CAR ligand is an antibody that binds to the CAR molecule, e.g., binds to the extracellular antigen binding domain of CAR (e.g., an antibody that binds to the antigen binding domain, e.g., an anti-idiotypic antibody; or an antibody that binds to a constant region of the extracellular binding domain). In other embodiments, the CAR ligand is a CAR antigen molecule (e.g., a CAR antigen molecule as described herein).

[0891] In one aspect, a method for detecting and/or quantifying CAR-expressing cells is disclosed. For example, the CAR ligand can be used to detect and/or quantify CAR-expressing cells in vitro or in vivo (e.g., clinical monitoring of CAR-expressing cells in a patient, or dosing a patient). The method includes:
[0892] providing the CAR ligand (optionally, a labelled CAR ligand, e.g., a CAR ligand that includes a tag, a bead, a radioactive or fluorescent label);
[0893] acquiring the CAR-expressing cell (e.g., acquiring a sample containing CAR-expressing cells, such as a manufacturing sample or a clinical sample);
[0894] contacting the CAR-expressing cell with the CAR ligand under conditions where binding occurs, thereby detecting the level (e.g., amount) of the CAR-expressing cells present. Binding of the CAR-expressing cell with the CAR ligand can be detected using standard techniques such as FACS, ELISA and the like.

[0895] In another aspect, a method of expanding and/or activating cells (e.g., immune effector cells) is disclosed. The method includes:
[0896] providing a CAR-expressing cell (e.g., a first CAR-expressing cell or a transiently expressing CAR cell);
[0897] contacting said CAR-expressing cell with a CAR ligand, e.g., a CAR ligand as described herein), under conditions where immune cell expansion and/or proliferation occurs, thereby producing the activated and/or expanded cell population.

[0898] In certain embodiments, the CAR ligand is present on (e.g., is immobilized or attached to a substrate, e.g., a non-naturally occurring substrate). In some embodiments, the substrate is a non-cellular substrate. The non-cellular substrate can be a solid support chosen from, e.g., a plate (e.g., a microtiter plate), a membrane (e.g., a nitrocellulose membrane), a matrix, a chip or a bead. In embodiments, the CAR ligand is present in the substrate (e.g., on the substrate surface). The CAR ligand can be immobilized, attached, or associated covalently or non-covalently (e.g., cross-linked) to the substrate. In one embodiment, the CAR ligand is attached (e.g., covalently attached) to a bead. In the aforesaid embodiments, the immune cell population can be expanded in vitro or ex vivo. The method can further include culturing the population of immune cells in the presence of the ligand of the CAR molecule, e.g., using any of the methods described herein.

[0899] In other embodiments, the method of expanding and/or activating the cells further comprises addition of a second stimulatory molecule, e.g., CD28. For example, the CAR ligand and the second stimulatory molecule can be immobilized to a substrate, e.g., one or more beads, thereby providing increased cell expansion and/or activation.

[0900] In other embodiments, a method for selecting or enriching for a CAR expressing cell is provided. The method includes contacting the CAR expressing cell with a CAR ligand as described herein; and selecting the cell on the basis of binding of the CAR ligand.

[0901] In yet other embodiments, a method for depleting (e.g., reducing and/or killing) a CAR expressing cell is provided. The method includes contacting the CAR expressing cell with a CAR ligand as described herein; and targeting the cell on the basis of binding of the CAR ligand thereby reducing the number, and/or killing, the CAR-expressing cell. In one embodiment, the CAR ligand is coupled to a toxic agent (e.g., a toxin or a cell ablative drug). In another embodiment, the anti-idiotypic antibody can cause effector cell activity, e.g., ADCC or ADC activities.

[0902] Exemplary anti-CAR antibodies that can be used in the methods disclosed herein are described, e.g., in WO 2014/190273 and by Jena et al., “Chimeric Antigen Receptor (CAR)-Specific Monoclonal Antibody to Detect CD19-Specific T cells in Clinical Trials”, PLOS March 2013 8:3 e57838, the contents of which are incorporated by reference. In some aspects and embodiments, the compositions and methods herein are optimized for a specific subset of T cells, e.g., as described in US Serial No. PCT/US2015/043219 filed Jul. 31, 2015, the contents of which are incorporated herein by reference in their entirety. In some embodiments, the optimized subsets of T cells display an enhanced persistence compared to a control T cell, e.g., a T cell of a different type (e.g., CD8+ or CD4+) expressing the same construct.

[0903] In some embodiments, a CD4+ T cell comprises a CAR described herein, which CAR comprises an intracellular signaling domain suitable for (e.g., optimized for, e.g., leading to enhanced persistence in) a CD4+ T cell, e.g., an ICOS domain. In some embodiments, a CD8+ T cell comprises a CAR described herein, which CAR comprises an intracellular signaling domain suitable for (e.g., optimized for, e.g., leading to enhanced persistence of) a CD8+ T cell, e.g., a 4-1BB domain, a CD28 domain, or another costimulatory domain other than an ICOS domain. In some embodiments, the CAR described herein comprises an antigen binding domain described herein, e.g., a CAR comprising an antigen binding domain.

[0904] In an aspect, described herein is a method of treating a subject, e.g., a subject having cancer. The method includes administering to said subject, an effective amount of:
[0905] 1) a CD4+ T cell comprising a CAR (the CARCD4+) comprising:
[0906] an antigen binding domain, e.g., an antigen binding domain described herein;
[0907] a transmembrane domain; and
[0908] an intracellular signaling domain, e.g., a first costimulatory domain, e.g., an ICOS domain; and
[0909] 2) a CD8+ T cell comprising a CAR (the CARCD8+) comprising:
[0910] an antigen binding domain, e.g., an antigen binding domain described herein;
[0911] a transmembrane domain; and
[0912] an intracellular signaling domain, e.g., a second costimulatory domain, e.g., a 4-1BB domain, a CD28 domain, or another costimulatory domain other than an ICOS domain;
[0913] wherein the CARCD4+ and the CARCD8+ differ from one another.

[0914] Optionally, the method further includes administering:
[0915] 3) a second CD8+ T cell comprising a CAR (the second CARCD8+) comprising:
[0916] an antigen binding domain, e.g., an antigen binding domain described herein;
[0917] a transmembrane domain; and
[0918] an intracellular signaling domain, wherein the second CARCD8+ comprises an intracellular signaling domain, e.g., a costimulatory signaling domain, not present on the CARCD8+, and, optionally, does not comprise an ICOS signaling domain.

### Methods of Manufacture/Production

[0919] In some embodiments, the methods disclosed herein further include administering a T cell depleting agent after treatment with the cell (e.g., an immune effector cell as described herein, e.g., an immune effector cell expressing CAR driven by a truncated PGK1 promoter), thereby reducing (e.g., depleting) the CAR-expressing cells (e.g., the CD19CAR-expressing cells). Such T cell depleting agents can be used to effectively deplete CAR-expressing cells (e.g., CD19CAR-expressing cells) to mitigate toxicity. In some embodiments, the CAR-expressing cells were manufactured according to a method herein, e.g., assayed (e.g., before or after transfection or transduction) according to a method herein.

[0920] In some embodiments, the T cell depleting agent is administered one, two, three, four, or five weeks after administration of the cell, e.g., the population of immune effector cells, described herein.

[0921] In one embodiment, the T cell depleting agent is an agent that depletes CAR-expressing cells, e.g., by inducing antibody dependent cell-mediated cytotoxicity (ADCC) and/or complement-induced cell death. For example, CAR-expressing cells described herein may also express an antigen (e.g., a target antigen) that is recognized by molecules capable of inducing cell death, e.g., ADCC or complement-induced cell death. For example, CAR expressing cells described herein may also express a target protein (e.g., a receptor) capable of being targeted by an antibody or antibody fragment. Examples of such target proteins include, but are not limited to, EpCAM, VEGFR, integrins (e.g., integrins αvβ3, α4, αI3/4β3, α4β7, α5β1, αvβ3, αv), members of the TNF receptor superfamily (e.g., TRAIL-R1, TRAIL-R2), PDGF Receptor, interferon receptor, folate receptor, GPNMB, ICAM-1, HLA-DR, CEA, CA-125, MUC1, TAG-72, IL-6 receptor, 5T4, GD2, GD3, CD2, CD3, CD4, CD5, CD11, CD11a/LFA-1, CD15, CD18/ITGB2, CD19, CD20, CD22, CD23/lgE Receptor, CD25, CD28, CD30, CD33, CD38, CD40, CD41, CD44, CD51, CD52, CD62L, CD74, CD80, CD125, CD147/basigin, CD152/CTLA-4, CD154/CD40L, CD195/CCR5, CD319/SLAMF7, and EGFR, and truncated versions thereof (e.g., versions preserving one or more extracellular epitopes but lacking one or more regions within the cytoplasmic domain).

[0922] In some embodiments, the CAR expressing cell co-expresses the CAR and the target protein, e.g., naturally expresses the target protein or is engineered to express the target protein. For example, the cell, e.g., the population of immune effector cells, can include a nucleic acid (e.g., vector) comprising the CAR nucleic acid (e.g., a CAR nucleic acid as described herein) and a nucleic acid encoding the target protein.

[0923] In one embodiment, the T cell depleting agent is a CD52 inhibitor, e.g., an anti-CD52 antibody molecule, e.g., alemtuzumab.

[0924] In other embodiments, the cell, e.g., the population of immune effector cells, expresses a CAR molecule as described herein (e.g., CD19CAR) and the target protein recognized by the T cell depleting agent. In one embodiment, the target protein is CD20. In embodiments where the target protein is CD20, the T cell depleting agent is an anti-CD20 antibody, e.g., rituximab.

[0925] In further embodiments of any of the aforesaid methods, the methods further include transplanting a cell, e.g., a hematopoietic stem cell, or a bone marrow, into the mammal.

[0926] In another aspect, the invention features a method of conditioning a mammal prior to cell transplantation. The method includes administering to the mammal an effective amount of the cell comprising a CAR nucleic acid or polypeptide, e.g., a CD19 CAR nucleic acid or polypeptide. In some embodiments, the cell transplantation is a stem cell transplantation, e.g., a hematopoietic stem cell transplantation, or a bone marrow transplantation. In other embodiments, conditioning a subject prior to cell transplantation includes reducing the number of target-expressing cells in a subject, e.g., CD19-expressing normal cells or CD19-expressing cancer cells.

### Biopolymer Delivery Methods

[0927] In some embodiments, one or more CAR-expressing cells as disclosed herein can be administered or delivered to the subject via a biopolymer scaffold, e.g., a biopolymer implant. Biopolymer scaffolds can support or enhance the delivery, expansion, and/or dispersion of the CAR-expressing cells described herein. A biopolymer scaffold comprises a biocompatible (e.g., does not substantially induce an inflammatory or immune response) and/or a biodegradable polymer that can be naturally occurring or synthetic. Exemplary biopolymers are described, e.g., in paragraphs 1004-1006 of International Application WO2015/142675, filed Mar. 13, 2015, which is herein incorporated by reference in its entirety.

### Therapeutic Applications

[0928] CD19 Associated Diseases and/or Disorders

[0929] In one aspect, the invention provides methods for treating a disease associated with CD19 expression. In one aspect, the invention provides methods for treating a disease wherein part of the cancer is negative for CD19 and part of the cancer is positive for CD19. For example, the methods and compositions of the invention are useful for treating subjects that have undergone treatment for a disease associated with expression of CD19, wherein the subject that has undergone treatment related to CD19 expression, e.g., treatment with a CD19 CAR, exhibits a disease associated with expression of CD19.

[0930] In another aspect, the invention provides methods for treating a disease associated with expression of a B-cell antigen, e.g., one or more of CD10, CD20, CD22, CD34, CD123, FLT-3, or ROR1. In one aspect, the invention provides methods for treating a disease wherein part of the tumor is negative for the B-cell antigen and part of the tumor is positive for B-cell antigen. For example, the compositions and methods of the invention are useful for treating subjects that have undergone treatment for a disease associated with expression of the B-cell antigen, wherein the subject that has undergone treatment related to expression of a B-cell antigen, e.g., treatment with a CAR targeting a B-cell antigen, exhibits a disease associated with expression of the B-cell antigen. In a third aspect, the invention provides methods for treating a disease associated with expression of the B-cell antigen, e.g., associated with the expression of CD19 and one or more other B-cell antigens.

[0931] In one aspect, the invention pertains to a vector comprising CD19 CAR operably linked to promoter for expression in mammalian cells, e.g., T cells or NK cells. In one aspect, the invention provides a recombinant cell, e.g., a T cell or NK cell, expressing the CD19 CAR for use in treating CD19-expressing cancers, wherein the recombinant T cell expressing the CD19 CAR is termed a CD19 CART. In one aspect, the CD19 CART described herein, is capable of contacting a cancer cell with at least one CD19 CAR expressed on its surface such that the CART targets the cancer cell and growth of the cancer is inhibited.

[0932] In one aspect the invention pertains to a CD22 inhibitor which is a CD22 CART, e.g., a T cell, expressing the CD22 CAR for use in treating CD22-expressing tumors in combination with CD19 CARTS, wherein the recombinant T cell expressing the CD22 CAR is termed a CD22 CART. In one aspect, the CD22 CART described herein, is capable of contacting a tumor cell with at least one CD22 CAR expressed on its surface such that the CD22 CART targets the tumor cell and growth of the tumor is inhibited.

[0933] In one aspect, the invention pertains to a method of inhibiting growth of a CD19-expressing cancer cell, comprising contacting the cancer cell with a CD19 CAR expressing cell, e.g., a CD19 CART cell, described, and one or more other CAR expressing cells, e.g., as described herein, such that the CART is activated in response to the antigen and targets the cancer cell, wherein the growth of the cancer is inhibited. The CD19 CAR-expressing cell, e.g., T cell, is administered in combination with a B-cell inhibitor, e.g., a B-cell inhibitor described herein.

[0934] In some embodiments, the CD19 inhibitor (e.g., one or more cells that express a CAR molecule that binds CD19, e.g., a CAR molecule that binds CD19 described herein) and the B cell inhibitor (e.g., one or more inhibitors of CD10, CD19, CD20, CD22, CD34, CD123, FLT-3, or ROR1, e.g., as described herein) are administered simultaneously. In some embodiments, the CD19 inhibitor and the B cell inhibitor are infused into a subject simultaneously, e.g., are admixed in the same infusion volume. In other embodiments, the simultaneous administration comprises separate administration of the CD19 inhibitor and the B cell inhibitor, e.g., administration of each is initiated within a predetermined time interval (e.g., within 15, 30, or 45 minutes of each other).

[0935] In some embodiments, the start of CD19 inhibitor delivery and the start of B cell inhibitor delivery are within 1, 2, 3, 4, 6, 12, 18, or 24 hours of each other, or within 1, 2, 3, 4, 5, 10, 15, 20, 25, 30, 35, 40, 60, 80, or 100 days of each other. In some embodiments, the end of CD19 inhibitor delivery and the end of B cell inhibitor delivery are within 1, 2, 3, 4, 6, 12, 18, or 24 hours of each other, or within 1, 2, 3, 4, 5, 10, 15, 20, 25, 30, 35, 40, 60, 80, or 100 days of each other. In some embodiments, the overlap in terms of administration between the CD19 inhibitor delivery (e.g., infusion) and the end of B cell inhibitor delivery (e.g., infusion) is at least 1, 2, 3, 4, 5, 10, 15, 20, 25, 30, or 45 minutes.

[0936] In some embodiments, the B cell inhibitor is administered while the one or more cells that express a CAR molecule that binds CD19 are present (e.g., undergoing expansion) in the subject. In some embodiments, the CD19 inhibitor is administered while the one or more cells that express a CAR molecule that binds one or more of CD10, CD20, CD22, CD34, CD123, FLT-3, ROR1, CD79b, CD179b, or CD79a are present (e.g., undergoing expansion) in the subject.

[0937] The invention includes (among other things) a type of cellular therapy where T cells are genetically modified to express a chimeric antigen receptor (CAR) and the CAR T cell is infused to a recipient in need thereof. The infused cell is able to kill tumor cells in the recipient. Unlike antibody therapies, CAR-modified T cells are able to replicate in vivo resulting in long-term persistence that can lead to sustained tumor control. In various aspects, the T cells administered to the patient, or their progeny, persist in the patient for at least four months, five months, six months, seven months, eight months, nine months, ten months, eleven months, twelve months, thirteen months, fourteen month, fifteen months, sixteen months, seventeen months, eighteen months, nineteen months, twenty months, twenty-one months, twenty-two months, twenty-three months, two years, three years, four years, or five years after administration of the T cell to the patient.

[0938] The invention also includes a type of cellular therapy where immune effector cells, e.g., NK cells or T cells are modified, e.g., by in vitro transcribed RNA, to transiently express a chimeric antigen receptor (CAR) and the CAR-expressing (e.g., CAR T) cell is infused to a recipient in need thereof. The infused cell is able to kill cancer cells in the recipient. Thus, in various aspects, the CAR-expressing cells, e.g., T cells, administered to the patient, is present for less than one month, e.g., three weeks, two weeks, one week, after administration of the CAR-expressing cell, e.g., T cell, to the patient.

[0939] Without wishing to be bound by any particular theory, the anti-cancer immunity response elicited by the CAR-modified T cells may be an active or a passive immune response, or alternatively may be due to a direct vs indirect immune response. In one aspect, the CAR (e.g., CD19-CAR) transduced T cells exhibit specific proinflammatory cytokine secretion and potent cytolytic activity in response to human cancer cells expressing the target antigen (e.g., CD19), resist soluble target antigen inhibition, mediate bystander killing and mediate regression of an established human cancer. For example, antigen-less cancer cells within a heterogeneous field of target antigen-expressing cancer may be susceptible to indirect destruction by target antigen-redirected T cells that has previously reacted against adjacent antigen-positive cancer cells.

[0940] In one aspect, the CAR-modified cells of the invention, e.g., fully human CAR T cells, may be a type of vaccine for ex vivo immunization and/or in vivo therapy in a mammal. In one aspect, the mammal is a human.

[0941] With respect to ex vivo immunization, at least one of the following occurs in vitro prior to administering the cell into a mammal: i) expansion of the cells, ii) introducing a nucleic acid encoding a CAR to the cells or iii) cryopreservation of the cells.

[0942] Ex vivo procedures are well known in the art and are discussed more fully below. Briefly, cells are isolated from a mammal (e.g., a human) and genetically modified (i.e., transduced or transfected in vitro) with a vector expressing a CAR disclosed herein. The CAR-modified cell can be administered to a mammalian recipient to provide a therapeutic benefit. The mammalian recipient may be a human and the CAR-modified cell can be autologous with respect to the recipient. Alternatively, the cells can be allogeneic, syngeneic or xenogeneic with respect to the recipient.

[0943] The procedure for ex vivo expansion of hematopoietic stem and progenitor cells is described in U.S. Pat. No. 5,199,942, incorporated herein by reference, can be applied to the cells of the present invention. Other suitable methods are known in the art, therefore the present invention is not limited to any particular method of ex vivo expansion of the cells. Briefly, ex vivo culture and expansion of T cells can comprise: (1) collecting CD34+ hematopoietic stem and progenitor cells from a mammal from peripheral blood harvest or bone marrow explants; and (2) expanding such cells ex vivo. In addition to the cellular growth factors described in U.S. Pat. No. 5,199,942, other factors such as flt3-L, IL-1, IL-3 and c-kit ligand, can be used for culturing and expansion of the cells.

[0944] In addition to using a cell-based vaccine in terms of ex vivo immunization, also included in the methods described herein are compositions and methods for in vivo immunization to elicit an immune response directed against an antigen in a patient.

[0945] Generally, the cells activated and expanded as described herein may be utilized in the treatment and prevention of diseases that arise in individuals who are immunocompromised. In particular, the CAR-expressing cells described herein are used in the treatment of diseases, disorders and conditions associated with expression of one or more B-cell antigen. In certain aspects, the cells are used in the treatment of patients at risk for developing diseases, disorders and conditions associated with expression of one or more B-cell antigen. Thus, the present invention provides (among other things) methods for the treatment or prevention of diseases, disorders and conditions associated with expression of a B-cell antigen comprising administering to a subject in need thereof, a therapeutically effective amount of the CD19 CAR-expressing cells described herein, in combination with one or more of B-cell inhibitor described herein.

[0946] The present invention also provides methods for inhibiting the proliferation or reducing a CD19-expressing cell population, the methods comprising contacting a population of cells comprising a CD19-expressing cell with an anti-CD19 CAR-expressing cell described herein that binds to the CD19-expressing cell, and contacting the population of CD19-expressing cells with one or more of a B-cell inhibitor described herein. In a specific aspect, the present invention provides methods for inhibiting the proliferation or reducing the population of cancer cells expressing CD19, the methods comprising contacting the CD19-expressing cancer cell population with an anti-CD19 CAR-expressing cell described herein that binds to the CD19-expressing cell, and contacting the CD19-expressing cell with one or more B-cell described herein. In one aspect, the present invention provides methods for inhibiting the proliferation or reducing the population of cancer cells expressing CD19, the methods comprising contacting the CD19-expressing cancer cell population with an anti-CD19 CAR-expressing cell described herein that binds to the CD19-expressing cell and contacting the CD19-expressing cell with one or more B-cell described herein. In certain aspects, the combination of the anti-CD19 CAR-expressing cell described herein and one or more B-cell described herein reduces the quantity, number, amount or percentage of cells and/or cancer cells by at least 25%, at least 30%, at least 40%, at least 50%, at least 65%, at least 75%, at least 85%, at least 95%, or at least 99% in a subject with or animal model for a hematological cancer or another cancer associated with CD19-expressing cells relative to a negative control. In one aspect, the subject is a human.

[0947] The present invention also provides methods for inhibiting the proliferation or reducing a cell population comprising CD19-expressing cells and cells expressing a second B-cell antigen. In one aspect, CD19 and second B-cell antigen are expressed by the same cells within the population. In another aspect, CD19 and second B-cell antigen are expressed by distinct subsets of cells within the population. In another aspect, CD19 and second B-cell antigen are expressed by overlapping subsets of cells within the population, such that some cells express CD19 and second B-cell antigen, some cells express CD19, and some cells express the second B-cell antigen.

[0948] The present invention also provides methods for inhibiting the proliferation or reducing a cell population expressing CD19 and a second B-cell antigen, the methods comprising (i) contacting a population of cells comprising a CD19-expressing cell with an anti-CD19 CAR-expressing cell described herein that binds to the CD19-expressing cell, and (ii) contacting the second B-cell antigen-expressing cell with a second CAR-expressing cell described herein that binds to the second B-cell antigen-expressing cell. In a specific aspect, the present invention provides methods for inhibiting the proliferation or reducing the population of cancer cells expressing CD19 and a second B-cell antigen, the methods comprising (i) contacting the CD19-expressing cancer cell population with an anti-CD19 CAR-expressing cell described herein that binds to the CD19-expressing cell, and (ii) contacting the second B-cell antigen-expressing cell population with a second CAR-expressing cell described herein that binds to the cell expressing the second B-cell antigen. In one aspect, the present invention provides methods for inhibiting the proliferation or reducing the population of cancer cells expressing CD19 and/or a second B-cell antigen, the methods comprising (i) contacting the CD19-expressing cancer cell population with an anti-CD19 CAR-expressing cell described herein that binds to the CD19-expressing cell and (ii) contacting the second B-cell antigen-expressing cell population with a second CAR-expressing cell described herein that binds to the cell expressing the second B-cell antigen. In certain aspects, the combination of the anti-CD19 CAR-expressing cell described herein and the second CAR-expressing cell described herein, reduces the quantity, number, amount or percentage of cells and/or cancer cells by at least 25%, at least 30%, at least 40%, at least 50%, at least 65%, at least 75%, at least 85%, at least 95%, or at least 99% in a subject with or animal model for a hematological cancer or another cancer associated with CD19 and/or second B-cell antigen-expressing cells relative to a negative control. In one aspect, the subject is a human.

[0949] The present invention also provides methods for preventing, treating and/or managing a disease associated with CD19-expressing cells (e.g., a hematologic cancer or atypical cancer expressing CD19), the methods comprising administering to a subject in need an anti-CD19 CAR-expressing cell that binds to the CD19-expressing cell and administering one or B-cell inhibitor described herein. In one aspect, the subject is a human. Non-limiting examples of disorders associated with CD19-expressing cells include autoimmune disorders (such as lupus), inflammatory disorders (such as allergies and asthma) and cancers (such as hematological cancers or atypical cancers expressing CD19).

[0950] The present invention also provides methods for preventing, treating and/or managing a disease associated with CD19 and/or a second B-cell antigen-expressing cells (e.g., a hematologic cancer or atypical cancer expressing CD19 and/or second B-cell antigen), the methods comprising administering to a subject in need an anti-CD19 CAR-expressing cell that binds to the CD19-expressing cell and a B-cell inhibitor.

[0951] The present invention also provides methods for preventing, treating and/or managing a disease associated with CD19-expressing cells, the methods comprising administering to a subject in need an anti-CD19 CART cell of the invention that binds to the CD19-expressing cell. In one aspect, the subject is a human.

[0952] The present invention also provides methods for preventing relapse of cancer associated with CD19-expressing cells, the methods comprising administering to a subject in need thereof an anti-CD19 CART cell of the invention that binds to the CD19-expressing cell. In one aspect, the methods comprise administering to the subject in need thereof an effective amount of an anti-CD19 CART cell described herein that binds to the CD19-expressing cell in combination with an effective amount of another therapy.

[0953] In one aspect, the invention pertains to a method of treating cancer in a subject. The method comprises administering to the subject a CD19 CAR-expressing cell, e.g., T cell, described herein, in combination with a B-cell inhibitor, such that the cancer is treated in the subject. An example of a cancer that is treatable by the methods described herein is a cancer associated with expression of CD19. In one embodiment, the disease is a solid or liquid tumor. In one embodiment, the disease is a hematologic cancer, e.g., as described herein.

[0954] Non-cancer related indications associated with expression of CD19 include, but are not limited to, e.g., autoimmune disease, (e.g., lupus), inflammatory disorders (allergy and asthma) and transplantation.

[0955] In some embodiments, a cancer that can be treated with the combination described herein is multiple myeloma. Multiple myeloma is a cancer of the blood, characterized by accumulation of a plasma cell clone in the bone marrow. Current therapies for multiple myeloma include, but are not limited to, treatment with lenalidomide, which is an analog of thalidomide. Lenalidomide has activities which include anti-tumor activity, angiogenesis inhibition, and immunomodulation. In some embodiments, a CD19 CAR, e.g., as described herein, may be used to target myeloma cells. In some embodiments, the combination described herein can be used with one or more additional therapies, e.g., lenalidomide treatment.

[0956] The CAR-expressing cells described herein may be administered either alone, or as a pharmaceutical composition in combination with diluents and/or with other components such as IL-2 or other cytokines or cell populations.

### Hematologic Cancers

[0957] Hematological cancer conditions are the types of cancer such as leukemia, lymphoma and malignant lymphoproliferative conditions that affect blood, bone marrow and the lymphatic system.

[0958] In one embodiment, the hematologic cancer is leukemia. In one embodiment, the cancer is selected from the group consisting of one or more acute leukemias including but not limited to B-cell acute lymphoid leukemia (BALL), T-cell acute lymphoid leukemia (TALL), small lymphocytic leukemia (SLL), acute lymphoid leukemia (ALL); one or more chronic leukemias including but not limited to chronic myelogenous leukemia (CIVIL), chronic lymphocytic leukemia (CLL); additional hematologic cancers or hematologic conditions including, but not limited to mantle cell lymphoma (MCL), B cell prolymphocytic leukemia, blastic plasmacytoid dendritic cell neoplasm, Burkitt's lymphoma, diffuse large B cell lymphoma, follicular lymphoma, hairy cell leukemia, small cell- or a large cell-follicular lymphoma, malignant lymphoproliferative conditions, MALT lymphoma, Marginal zone lymphoma, multiple myeloma, myelodysplasia and myelodysplastic syndrome, non-Hodgkin lymphoma, Hodgkin lymphoma, plasmablastic lymphoma, plasmacytoid dendritic cell neoplasm, Waldenstrom macroglobulinemia, and “preleukemia” which are a diverse collection of hematological conditions united by ineffective production (or dysplasia) of myeloid blood cells. Diseases associated with CD19, CD20, or CD22 expression include, but not limited to atypical and/or non-classical cancers, malignancies, precancerous conditions or proliferative diseases expressing CD19, CD20, or CD22; and any combination thereof.

[0959] Leukemia can be classified as acute leukemia and chronic leukemia. Acute leukemia can be further classified as acute myelogenous leukemia (AML) and acute lymphoid leukemia (ALL). Chronic leukemia includes chronic myelogenous leukemia (CIVIL) and chronic lymphoid leukemia (CLL). Other related conditions include myelodysplastic syndromes (MDS, formerly known as “preleukemia”) which are a diverse collection of hematological conditions united by ineffective production (or dysplasia) of myeloid blood cells and risk of transformation to AML.

[0960] Lymphoma is a group of blood cell tumors that develop from lymphocytes. Exemplary lymphomas include non-Hodgkin lymphoma and Hodgkin lymphoma.

[0961] In an aspect, the invention pertains to a method of treating a mammal having Hodgkin lymphoma, comprising administering to the mammal an effective amount of the cells expressing a CD19 CAR molecule, e.g., a CD19 CAR molecule described herein and a B-cell inhibitor.

[0962] In one aspect, the compositions and CART cells or CAR expressing NK cells of the present invention are particularly useful for treating B cell malignancies, such as non-Hodgkin lymphomas, e.g., DLBCL, Follicular lymphoma, or CLL.

[0963] Non-Hodgkin lymphoma (NHL) is a group of cancers of lymphocytes, formed from either B or T cells. NHLs occur at any age and are often characterized by lymph nodes that are larger than normal, weight loss, and fever. Different types of NHLs are categorized as aggressive (fast-growing) and indolent (slow-growing) types. B-cell non-Hodgkin lymphomas include Burkitt lymphoma, chronic lymphocytic leukemia/small lymphocytic lymphoma (CLL/SLL), diffuse large B-cell lymphoma (DLBCL), follicular lymphoma, immunoblastic large cell lymphoma, precursor B-lymphoblastic lymphoma, and mantle cell lymphoma. Examples of T-cell non-Hodgkin lymphomas include mycosis fungoides, anaplastic large cell lymphoma, and precursor T-lymphoblastic lymphoma. Lymphomas that occur after bone marrow or stem cell transplantation are typically B-cell non-Hodgkin lymphomas. See, e.g., Maloney. NEJM. 366.21(2012):2008-16.

[0964] Diffuse large B-cell lymphoma (DLBCL) is a form of NHL that develops from B cells. DLBCL is an aggressive lymphoma that can arise in lymph nodes or outside of the lymphatic system, e.g., in the gastrointestinal tract, testes, thyroid, skin, breast, bone, or brain. Three variants of cellular morphology are commonly observed in DLBCL: centroblastic, immunoblastic, and anaplastic. Centroblastic morphology is most common and has the appearance of medium-to-large-sized lymphocytes with minimal cytoplasm. There are several subtypes of DLBCL. For example, primary central nervous system lymphoma is a type of DLBCL that only affects the brain is called and is treated differently than DLBCL that affects areas outside of the brain. Another type of DLBCL is primary mediastinal B-cell lymphoma, which often occurs in younger patients and grows rapidly in the chest. Symptoms of DLBCL include a painless rapid swelling in the neck, armpit, or groin, which is caused by enlarged lymph nodes. For some subjects, the swelling may be painful. Other symptoms of DLBCL include night sweats, unexplained fevers, and weight loss. Although most patients with DLBCL are adults, this disease sometimes occurs in children. Treatment for DLBCL includes chemotherapy (e.g., cyclophosphamide, doxorubicin, vincristine, prednisone, etoposide), antibodies (e.g., Rituxan), radiation, or stem cell transplants.

[0965] Follicular lymphoma a type of non-Hodgkin lymphoma and is a lymphoma of follicle center B-cells (centrocytes and centroblasts), which has at least a partially follicular pattern. Follicular lymphoma cells express the B-cell markers CD10, CD19, CD20, and CD22. Follicular lymphoma cells are commonly negative for CD5. Morphologically, a follicular lymphoma tumor is made up of follicles containing a mixture of centrocytes (also called cleaved follicle center cells or small cells) and centroblasts (also called large noncleaved follicle center cells or large cells). The follicles are surrounded by non-malignant cells, mostly T-cells. The follicles contain predominantly centrocytes with a minority of centroblasts. The World Health Organization (WHO) morphologically grades the disease as follows: grade 1 (<5 centroblasts per high-power field (hpf); grade 2 (6-15 centroblasts/hpf); grade 3 (>15 centroblasts/hpf). Grade 3 is further subdivided into the following grades: grade 3A (centrocytes still present); grade 3B (the follicles consist almost entirely of centroblasts). Treatment of follicular lymphoma includes chemotherapy, e.g., alkyating agents, nucleoside analogs, anthracycline-containing regimens, e.g., a combination therapy called CHOP—cyclophosphamide, doxorubicin, vincristine, prednisone/prednisolone, antibodies (e.g., rituximab), radioimmunotherapy, and hematopoietic stem cell transplantation.

[0966] CLL is a B-cell malignancy characterized by neoplastic cell proliferation and accumulation in bone morrow, blood, lymph nodes, and the spleen. The median age at time of diagnosis of CLL is about 65 years. Current treatments include chemotherapy, radiation therapy, biological therapy, or bone marrow transplantation. Sometimes symptoms are treated surgically (e.g., splenectomy removal of enlarged spleen) or by radiation therapy (e.g., de-bulking swollen lymph nodes). Chemotherapeutic agents to treat CLL include, e.g., fludarabine, 2-chlorodeoxyadenosine (cladribine), chlorambucil, vincristine, pentostatin, cyclophosphamide, alemtuzumab (Campath-1H), doxorubicin, and prednisone. Biological therapy for CLL includes antibodies, e.g., alemtuzumab, rituximab, and ofatumumab; as well as tyrosine kinase inhibitor therapies. A number of criteria can be used to classify stage of CLL, e.g., the Rai or Binet system. The Rai system describes CLL has having five stages: stage 0 where only lymphocytosis is present; stage I where lymphadenopathy is present; stage II where splenomegaly, lymphadenopathy, or both are present; stage III where anemia, organomegaly, or both are present (progression is defined by weight loss, fatigue, fever, massive organomegaly, and a rapidly increasing lymphocyte count); and stage IV where anemia, thrombocytopenia, organomegaly, or a combination thereof are present. Under the Binet staging system, there are three categories: stage A where lymphocytosis is present and less than three lymph nodes are enlarged (this stage is inclusive of all Rai stage 0 patients, one-half of Rai stage I patients, and one-third of Rai stage II patients); stage B where three or more lymph nodes are involved; and stage C wherein anemia or thrombocytopenia, or both are present. These classification systems can be combined with measurements of mutation of the immunoglobulin genes to provide a more accurate characterization of the state of the disease. The presence of mutated immunoglobulin genes correlates to improved prognosis.

[0967] In another embodiment, the CAR expressing cells of the present invention are used to treat cancers or leukemias, e.g., with leukemia stem cells. For example, the leukemia stem cells are CD34⁺/CD38⁻ leukemia cells.

CD20 and CD22 Associated Diseases and/or Disorders

[0968] The present invention provides, among other things, compositions and methods for treating a disease associated with expression of CD20 or CD22 or condition associated with cells which express CD20 or CD22 including, e.g., a proliferative disease such as a cancer or malignancy or a precancerous condition; or a noncancer related indication associated with cells which express CD20 or CD22. In one aspect, a cancer associated with expression of CD22 is a hematological cancer, e.g., a hematological cancer described herein.

[0969] Non-cancer related indications associated with expression of CD20 or CD22 may also be included. Non-cancer related indications associated with expression of CD20 or CD22 include, but are not limited to, e.g., autoimmune disease, (e.g., lupus, rheumatoid arthritis, multiple sclerosis autoimmune hemolytic anemia, pure red cell aplasia, idiopathic thrombocytopenic purpura, Evans syndrome, vasculitis, bullous skin disorders, type 1 diabetes mellitus, Sjogren's syndrome, anti-NMDA receptor encephalitis and Devic's disease, Graves' ophthalmopathy, and autoimmune pancreatitis), inflammatory disorders (allergy and asthma) and solid-organ or hematopoietic cell transplantation.

[0970] Compositions and methods disclosed herein may be used to treat hematologic diseases including, but not limited to myelodysplasia, anemia, paroxysmal nocturnal hemoglobinuria, aplastic anemia, acquired pure red cell anemia, Diamon-Blackfan anemia, Fanconi anemia, cytopenia, amegakaryotic thrombocytopenia, myeloproliferative disorders, polycythemia vera, essential thrombocytosis, myelofibrosis, hemoglobinopathies, sickle cell disease, β thalassemia major, among others.

[0971] In one aspect, the invention provides methods for treating a disease associated with CD22 expression. In one aspect, the invention provides methods for treating a disease wherein part of the tumor is negative for CD20 or CD22 and part of the tumor is positive for CD20 or CD22. For example, the CAR of the invention is useful for treating subjects that have undergone treatment for a disease associated with expression of CD20 or CD22, wherein the subject that has undergone treatment related to expression of CD20 or CD22 exhibits a disease associated with expression of CD20 or CD22.

[0972] In one aspect, the invention pertains to a method of inhibiting growth of a CD20 or CD22-expressing tumor cell, comprising contacting the tumor cell with a CD20 or CD22 CAR cell (e.g., T cell or NK cell) of the present invention such that the CART is activated in response to the antigen and targets the cancer cell, wherein the growth of the tumor is inhibited.

[0973] In one aspect, the invention pertains to a method of treating cancer in a subject. The method comprises administering to the subject a CD20 or CD22 CAR expressing cell (e.g., T cell or NK cell) of the present invention such that the cancer is treated in the subject. An example of a cancer that is treatable by the CD20 or CD22 CAR expressing cell (e.g., T cell or NK cell) of the invention is a cancer associated with expression of CD20 or CD22. An example of a cancer that is treatable by the CD20 or CD22 CAR expressing cell (e.g., T cell or NK cell) of the invention includes but is not limited to a hematological cancer described herein.

[0974] The invention includes a type of cellular therapy where cells (e.g., T cells or NK cells) are genetically modified to express a chimeric antigen receptor (CAR) and the CAR expressing cell (e.g., T cell or NK cells) is infused to a recipient in need thereof. The infused cell is able to kill tumor cells in the recipient. Unlike antibody therapies, CAR-modified cells (e.g., T cells or NK cells) are able to replicate in vivo resulting in long-term persistence that can lead to sustained tumor control. In various aspects, the cells (e.g., T cells or NK cells) administered to the patient, or their progeny, persist in the patient for at least four months, five months, six months, seven months, eight months, nine months, ten months, eleven months, twelve months, thirteen months, fourteen month, fifteen months, sixteen months, seventeen months, eighteen months, nineteen months, twenty months, twenty-one months, twenty-two months, twenty-three months, two years, three years, four years, or five years after administration of the T cell to the patient.

[0975] The invention also includes a type of cellular therapy where immune effector cells, e.g., NK cells or T cells are modified, e.g., by in vitro transcribed RNA, to transiently express a chimeric antigen receptor (CAR) and the CAR-expressing (e.g., CART or CAR expressing NK cell) cell is infused to a recipient in need thereof. The infused cell is able to kill cancer cells in the recipient. Thus, in various aspects, the CAR-expressing cells, e.g., T cells or NK cells, are administered to the patient, is present for less than one month, e.g., three weeks, two weeks, one week, after administration of the CAR-expressing cell, e.g., T cells or NK cell, to the patient.

[0976] Without wishing to be bound by any particular theory, the anti-tumor immunity response elicited by the CAR-modified cells (e.g., T cells or NK cells) may be an active or a passive immune response, or alternatively may be due to a direct vs indirect immune response. In one aspect, the CAR transduced cells (e.g., T cells or NK cells) exhibit specific proinflammatory cytokine secretion and potent cytolytic activity in response to human cancer cells expressing CD20 or CD22, resist soluble CD20 or CD22 inhibition, mediate bystander killing and mediate regression of an established human tumor. For example, antigen-less tumor cells within a heterogeneous field of CD20 or CD22-expressing tumor may be susceptible to indirect destruction by CD20 or CD22-redirected T cells that has previously reacted against adjacent antigen-positive cancer cells.

[0977] In one aspect, the CAR-modified cells (e.g., T cells or NK cells) of the invention, e.g., fully human CAR-expressing cells, may be a type of vaccine for ex vivo immunization and/or in vivo therapy in a mammal. In one aspect, the mammal is a human.

[0978] With respect to ex vivo immunization, at least one of the following occurs in vitro prior to administering the cell into a mammal: i) expansion of the cells, ii) introducing a nucleic acid encoding a CAR to the cells or iii) cryopreservation of the cells.

[0979] Ex vivo procedures are well known in the art and are discussed more fully below. Briefly, cells are isolated from a mammal (e.g., a human) and genetically modified (i.e., transduced or transfected in vitro) with a vector expressing a CAR disclosed herein. The CAR-modified cell can be administered to a mammalian recipient to provide a therapeutic benefit. The mammalian recipient may be a human and the CAR-modified cell can be autologous with respect to the recipient. Alternatively, the cells can be allogeneic, syngeneic or xenogeneic with respect to the recipient.

[0980] The procedure for ex vivo expansion of hematopoietic stem and progenitor cells is described in U.S. Pat. No. 5,199,942, incorporated herein by reference, can be applied to the cells of the present invention. Other suitable methods are known in the art, therefore the present invention is not limited to any particular method of ex vivo expansion of the cells. Briefly, ex vivo culture and expansion of T cells comprises: (1) collecting CD34+ hematopoietic stem and progenitor cells from a mammal from peripheral blood harvest or bone marrow explants; and (2) expanding such cells ex vivo. In addition to the cellular growth factors described in U.S. Pat. No. 5,199,942, other factors such as flt3-L, IL-1, IL-3 and c-kit ligand, can be used for culturing and expansion of the cells.

[0981] In addition to using a cell-based vaccine in terms of ex vivo immunization, the present invention also provides compositions and methods for in vivo immunization to elicit an immune response directed against an antigen in a patient.

[0982] Generally, the cells activated and expanded as described herein may be utilized in the treatment and prevention of diseases that arise in individuals who are immunocompromised. In particular, the CAR-modified cells (e.g., T cells or NK cells) of the invention are used in the treatment of diseases, disorders and conditions associated with expression of CD20 or CD22. In certain aspects, the cells of the invention are used in the treatment of patients at risk for developing diseases, disorders and conditions associated with expression of CD20 or CD22. Thus, the present invention provides methods for the treatment or prevention of diseases, disorders and conditions associated with expression of CD20 or CD22 comprising administering to a subject in need thereof, a therapeutically effective amount of the CAR-modified cells (e.g., T cells or NK cells) of the invention.

[0983] In one aspect the CAR expressing cells of the inventions may be used to treat a proliferative disease such as a cancer or malignancy or is a precancerous condition. In one aspect, a cancer associated with expression of CD20 or CD22 is a hematological cancer preleukemia, hyperproliferative disorder, hyperplasia or a dysplasia, which is characterized by abnormal growth of cells.

[0984] The CAR-modified cells of the present invention may be administered either alone, or as a pharmaceutical composition in combination with diluents and/or with other components such as IL-2 or other cytokines or cell populations.

[0985] The present invention also methods for inhibiting the proliferation or reducing a CD20 or CD22-expressing cell population, the methods comprising contacting a population of cells comprising a CD20 or CD22-expressing cell with a CD20 or CD22 CAR expressing cell of the invention that binds to the CD20 or CD22-expressing cell. In a specific aspect, the present invention provides methods for inhibiting the proliferation or reducing the population of cancer cells expressing CD20 or CD22, the methods comprising contacting the CD20 or CD22-expressing cancer cell population with a CD20 or CD22 CAR expressing cell of the invention that binds to the CD20 or CD22-expressing cell. In one aspect, the present invention provides methods for inhibiting the proliferation or reducing the population of cancer cells expressing CD20 or CD22, the methods comprising contacting the CD20 or CD22-expressing cancer cell population with a CD20 or CD22 CART of the invention that binds to the CD20 or CD22-expressing cell. In certain aspects, the CD20 or CD22 CAR expressing cell of the invention reduces the quantity, number, amount or percentage of cells and/or cancer cells by at least 25%, at least 30%, at least 40%, at least 50%, at least 65%, at least 75%, at least 85%, at least 95%, or at least 99% in a subject with or animal model for B-cell malignancy or another cancer associated with CD20 or CD22-expressing cells relative to a negative control. In one aspect, the subject is a human.

[0986] The present invention provides methods for preventing relapse of cancer associated with CD20 or CD22-expressing cells, the methods comprising administering to a subject in need thereof a CD20 or CD22 CAR expressing cell of the invention that binds to the CD20 or CD22-expressing cell. In one aspect, the methods comprise administering to the subject in need thereof an effective amount of a CD20 or CD22 CAR expressing cell described herein that binds to the CD20 or CD22-expressing cell in combination with an effective amount of another therapy.

[0987] In some embodiments, the CD22 expressing cell expresses CD19, CD123, FLT-3, ROR-1, CD79b, CD179b, CD79a, CD10, CD34, and/or CD20. In certain embodiments, the CD22 expressing cell expresses CD19. In some embodiments, the CD22-expressing cell does not express CD19. In some embodiments, the CD20 expressing cell expresses CD19, CD123, FLT-3, ROR-1, CD79b, CD179b, CD79a, CD10, CD34, and/or CD22. In certain embodiments, the CD20 expressing cell expresses CD19. In some embodiments, the CD20-expressing cell does not express CD19.

[0988] In some embodiments, the subject is a non-responder to CD19 CAR therapy. In some embodiments, the subject is a partial responder to CD19 CAR therapy. In some embodiments, the subject is a complete responder to CD19 CAR therapy. In some embodiments, the subject is a non-relapser to CD19 CAR therapy. In some embodiments, the subject is a partial relapser to CD19 CAR therapy. In some embodiments, the subject is a complete relapser to CD19 CAR therapy.

[0989] In some embodiments, a cancer or other condition that was previously responsive to treatment with CD19 CAR-expressing cells does not express CD19. In some embodiments, a cancer or other condition that was previously responsive to treatment with CD19 CAR-expressing cells has a 10%, 20%, 30%, 40%, 50% or more reduction in CD19 expression levels relative to when the cancer or other condition was responsive to treatment with CD19 CAR-expressing cells. In some embodiments, a cancer or other condition that was previously responsive to treatment with CD19 CAR-expressing cells expresses CD20, CD22, CD123, or any combination thereof.

[0990] In some embodiments, the CD20 or CD22 CAR-expressing cell of the invention is administered post-relapse of a cancer or other condition previously treated with CD19 CAR-expressing cell. In some embodiments, a CD19 CAR-expressing cell and a CD20 or CD22 CAR-expressing cell are administered concurrently, as described herein.

[0991] Bone Marrow Ablation

[0992] In one aspect, the present invention provides compositions and methods for bone marrow ablation. For example, in one aspect, the invention provides compositions and methods for eradication of at least a portion of existing bone marrow in a subject. It is described herein that, in certain instances, the CD19, C20, or CD22 CAR expressing cell comprising a CAR of the present invention eradicates CD19, C20, or CD22 positive bone marrow myeloid progenitor cells.

[0993] In one aspect, the invention provides a method of bone marrow ablation comprising administering a CD19, C20, or CD22 expressing CAR cell (e.g., T cell or NK cell) of the invention to a subject in need of bone marrow ablation. For example, the present method may be used to eradicate some or all of the existing bone marrow of a subject having a disease or disorder in which bone marrow transplantation or bone marrow reconditioning is a beneficial treatment strategy. In one aspect, the bone marrow ablation method of the invention, comprising the administration of a CD19, C20, or CD22 expressing CAR cell (e.g., T cell or NK cell) described elsewhere herein, is performed in a subject prior to bone marrow transplantation. Thus, in one aspect, the method of the invention provides a cellular conditioning regimen prior to bone marrow or stem cell transplantation. In one aspect, bone marrow transplantation comprises transplantation of a stem cell. The bone marrow transplantation may comprise transplantation of autologous or allogeneic cells.

[0994] The present invention provides a method of treating a disease or disorder comprising administering a CD19, C20, or CD22 expressing CAR cell (e.g., T cell or NK cell) of the invention to eradicate at least a portion of existing bone marrow. The method may be used as at least a portion of a treatment regimen for treating any disease or disorder where bone marrow transplantation is beneficial. That is, the present method may be used in any subject in need of a bone marrow transplant. In one aspect, bone marrow ablation comprising administration of a CD19, C20, or CD22 expressing CAR cell (e.g., T cell or NK cell) is useful in the treatment of AML. In certain aspects, bone marrow ablation by way of the present method is useful in treating a hematological cancer, a solid tumor, a hematologic disease, a metabolic disorder, HIV, HTLV, a lysosomal storage disorder, and an immunodeficiency.

[0995] Compositions and methods disclosed herein may be used to eradicate at least a portion of existing bone marrow to treat hematological cancers including, but not limited to, cancers described herein, e.g., leukemia, lymphoma, myeloma, ALL, AML, CLL, CIVIL, Hodgkin lymphoma, Non-Hodgkin lymphoma (e.g., DLBCL or follicular lymphoma), and multiple myeloma.

[0996] In one aspect, the present invention provides a method of treating cancer comprising bone marrow conditioning, where at least a portion of bone marrow of the subject is eradicated by the CD22 CAR cell (e.g., T cell or NK cell) of the invention. For example, in certain instances, the bone marrow of the subject comprises a malignant precursor cell that can be targeted and eliminated by the activity of the C20 or CD22 CAR cell (e.g., T cell or NK cell). In one aspect, a bone marrow conditioning therapy comprises administering a bone marrow or stem cell transplant to the subject following the eradication of native bone marrow. In one aspect, the bone marrow reconditioning therapy is combined with one or more other anti-cancer therapies, including, but not limited to anti-tumor CAR therapies, chemotherapy, radiation, and the like.

[0997] In one aspect, eradication of the administered CD19, CD20, or CD22 CAR expressing cells may be required prior to infusion of bone marrow or stem cell transplant. Eradication of the CD19, CD20, or CD22 expressing CAR cell (e.g., T cell or NK cell) may be accomplished using any suitable strategy or treatment, including, but not limited to, use of a suicide gene, limited CAR persistence using RNA encoded CARs, or anti-T cell modalities including antibodies or chemotherapy.

### Combination Therapies

[0998] The combination of a CAR as described herein (e.g., a CD20 CAR, a CD22 CAR, or a CD19 CAR-expressing cell described herein e.g., and one or more B-cell inhibitors, e.g., as described herein) may be used in combination with other known agents and therapies.

[0999] A CAR-expressing cell described herein (e.g., a CD20 CAR, a CD22 CAR, or a CD19 CAR-expressing cell), optionally the one or more B-cell inhibitors, and/or the at least one additional therapeutic agent can be administered simultaneously, in the same or in separate compositions, or sequentially. For sequential administration, the CAR-expressing cell described herein (e.g., a CD20 CAR, a CD22 CAR, or a CD19 CAR-expressing cell) can be administered first, and the additional agent can be administered second, or the order of administration can be reversed.

[1000] The CAR therapy and/or other therapeutic agents (such as a second CAR therapy), procedures or modalities can be administered during periods of active disorder, or during a period of remission or less active disease. The CAR therapy can be administered before the other treatment, concurrently with the treatment, post-treatment, or during remission of the disorder.

[1001] For instance, in some embodiments, CAR therapy is administered to a subject having a disease associated with CD19, CD20, or CD22 expression, e.g., a cancer. The subject can be assayed for indicators of responsiveness or relapse. In some embodiments, when the subject shows one or more signs of relapse, e.g., a frameshift and/or premature stop codon in CD19, an additional therapy is administered. In embodiments, the additional therapy is a B-cell inhibitor. The CD19 therapy may be continued (for instance, when there are still some CD19-expressing cancer cells detectable in the subject) or may be discontinued (for instance, when a risk-benefit analysis favors discontinuing the therapy).

[1002] When administered in combination, the CAR therapy and the additional agent (e.g., second or third agent), or all, can be administered in an amount or dose that is higher, lower or the same than the amount or dosage of each agent used individually, e.g., as a monotherapy. In certain embodiments, the administered amount or dosage of the CAR therapy, the additional agent (e.g., second or third agent), or all, is lower (e.g., at least 20%, at least 30%, at least 40%, or at least 50%) than the amount or dosage of each agent used individually, e.g., as a monotherapy. In other embodiments, the amount or dosage of the CAR therapy, the additional agent (e.g., second or third agent), or all, that results in a desired effect (e.g., treatment of cancer) is lower (e.g., at least 20%, at least 30%, at least 40%, or at least 50% lower) than the amount or dosage of each agent used individually, e.g., as a monotherapy, required to achieve the same therapeutic effect.

[1003] In embodiments, one or more of the therapeutics in the combination therapy is an antibody molecule. Cancer antigens can be targeted with monoclonal antibody therapy. Monoclonal antibody (mAb) therapy has been shown to exert powerful antitumor effects by multiple mechanisms, including complement-dependent cytotoxicity (CDC), antibody-dependent cellular cytotoxicity (ADCC) and direct cell inhibition or apoptosis-inducing effects on tumor cells that over-express the target molecules.

[1004] In further aspects, the combination of the CAR-expressing cell described herein (e.g., a CD20 CAR, a CD22 CAR, or a CD19 CAR-expressing cell, optionally in combination with one or more B-cell inhibitor) may be used in a treatment regimen in combination with surgery, chemotherapy, radiation, an mTOR pathway inhibitor, immunosuppressive agents, such as cyclosporin, azathioprine, methotrexate, mycophenolate, and FK506, antibodies, or other immunoablative agents such as CAMPATH, anti-CD3 antibodies or other antibody therapies, cytoxin, fludarabine, cyclosporin, FK506, rapamycin, mycophenolic acid, steroids, FR901228, cytokines, and irradiation. peptide vaccine, such as that described in Izumoto et al. 2008 J Neurosurg 108:963-971.

[1005] In one embodiment, the combination of a CD19, CD20, or CD22 CAR-expressing cell described herein (e.g., and one or more B-cell inhibitor) can be used in combination with a chemotherapeutic agent. Exemplary chemotherapeutic agents include an anthracycline (e.g., doxorubicin (e.g., liposomal doxorubicin)); a vinca alkaloid (e.g., vinblastine, vincristine, vindesine, vinorelbine); an alkylating agent (e.g., cyclophosphamide, decarbazine, melphalan, ifosfamide, temozolomide); an immune cell antibody (e.g., alemtuzamab, gemtuzumab, rituximab, tositumomab); an antimetabolite (including, e.g., folic acid antagonists, pyrimidine analogs, purine analogs and adenosine deaminase inhibitors (e.g., fludarabine)); a TNFR glucocorticoid induced TNFR related protein (GITR) agonist; a proteasome inhibitor (e.g., aclacinomycin A, gliotoxin or bortezomib); an immunomodulator such as thalidomide or a thalidomide derivative (e.g., lenalidomide).

[1006] General Chemotherapeutic agents considered for use in combination therapies include anastrozole (Arimidex®), bicalutamide (Casodex®), bleomycin sulfate (Blenoxane®), busulfan (Myleran®), busulfan injection (Busulfex®), capecitabine (Xeloda®), N4-pentoxycarbonyl-5-deoxy-5-fluorocytidine, carboplatin (Paraplatin®), carmustine (BiCNU®), chlorambucil (Leukeran®), cisplatin (Platinol®), cladribine (Leustatin®), cyclophosphamide (Cytoxan® or Neosar®), cytarabine, cytosine arabinoside (Cytosar-U®), cytarabine liposome injection (DepoCyt®), dacarbazine (DTIC-Dome®), dactinomycin (Actinomycin D, Cosmegan), daunorubicin hydrochloride (Cerubidine®), daunorubicin citrate liposome injection (DaunoXome®), dexamethasone, docetaxel (Taxotere®), doxorubicin hydrochloride (Adriamycin®, Rubex®), etoposide (Vepesid®), fludarabine phosphate (Fludara®), 5-fluorouracil (Adrucil®, Efudex®), flutamide (Eulexin®), tezacitibine, gemcitabine (difluorodeoxycitidine), hydroxyurea (Hydrea®), Idarubicin (Idamycin®), ifosfamide (IFEX®), irinotecan (Camptosar®), L-asparaginase (ELSPAR®), leucovorin calcium, melphalan (Alkeran®), 6-mercaptopurine (Purinethol®), methotrexate (Folex®), mitoxantrone (Novantrone®), mylotarg, paclitaxel (Taxol®), nab-paclitaxel (Abraxane®), phoenix (Yttrium90/MX-DTPA), pentostatin, polifeprosan 20 with carmustine implant (Gliadel®), tamoxifen citrate (Nolvadex®), teniposide (Vumon®), 6-thioguanine, thiotepa, tirapazamine (Tirazone®), topotecan hydrochloride for injection (Hycamptin®), vinblastine (Velban®), vincristine (Oncovin®), and vinorelbine (Navelbine®).

[1007] Treatment with a combination of a chemotherapeutic agent and a cell expressing a CAR molecule described herein can be used to treat a hematologic cancer described herein, e.g., AML. In embodiments, the combination of a chemotherapeutic agent and a CAR-expressing cell is useful for targeting, e.g., killing, cancer stem cells, e.g., leukemic stem cells, e.g., in subjects with AML. In embodiments, the combination of a chemotherapeutic agent and a CAR-expressing cell is useful for treating minimal residual disease (MRD). MRD refers to the small number of cancer cells that remain in a subject during treatment, e.g., chemotherapy, or after treatment. MRD is often a major cause for relapse. The present invention provides a method for treating cancer, e.g., MRD, comprising administering a chemotherapeutic agent in combination with a CAR-expressing cell, e.g., as described herein.

[1008] In an embodiment, the chemotherapeutic agent is administered prior to administration of the cell expressing a CAR molecule, e.g., a CAR molecule described herein. In chemotherapeutic regimens where more than one administration of the chemotherapeutic agent is desired, the chemotherapeutic regimen is initiated or completed prior to administration of a cell expressing a CAR molecule, e.g., a CAR molecule described herein. In embodiments, the chemotherapeutic agent is administered at least 1 day, 2 days, 3 days, 4 days, 5 days, 6 days, 7 days, 8 days, 9 days, 10 days, 11 days, 12 days, 13 days, 14 days, 15 days, 20 days, 25 days, or 30 days prior to administration of the cell expressing the CAR molecule. In embodiments, the chemotherapeutic regimen is initiated or completed at least 1 day, 2 days, 3 days, 4 days, 5 days, 6 days, 7 days, 8 days, 9 days, 10 days, 11 days, 12 days, 13 days, 14 days, 15 days, 20 days, 25 days, or 30 days prior to administration of the cell expressing the CAR molecule. In embodiments, the chemotherapeutic agent is a chemotherapeutic agent that increases expression of CD19, CD20, or CD22 on the cancer cells, e.g., the tumor cells, e.g., as compared to expression on normal or non-cancer cells. Expression can be determined, for example, by immunohistochemical staining or flow cytometry analysis. For example, the chemotherapeutic agent is cytarabine (Ara-C).

[1009] Anti-cancer agents of particular interest for combinations with the compounds of the present invention include: antimetabolites; drugs that inhibit either the calcium dependent phosphatase calcineurin or the p70S6 kinase FK506) or inhibit the p70S6 kinase; alkylating agents; mTOR inhibitors; immunomodulators; anthracyclines; vinca alkaloids; proteosome inhibitors; GITR agonists; protein tyrosine phosphatase inhibitors; a CDK4 kinase inhibitor; a BTK kinase inhibitor; a MKN kinase inhibitor; a DGK kinase inhibitor; or an oncolytic virus.

[1010] Exemplary antimetabolites include, without limitation, folic acid antagonists (also referred to herein as antifolates), pyrimidine analogs, purine analogs and adenosine deaminase inhibitors): methotrexate (Rheumatrex®, Trexall®), 5-fluorouracil (Adrucil®, Efudex®, Fluoroplex®), floxuridine (FUDF®), cytarabine (Cytosar-U®, Tarabine PFS), 6-mercaptopurine (Puri-Nethol®)), 6-thioguanine (Thioguanine Tabloid®), fludarabine phosphate (Fludara®), pentostatin (Nipent®), pemetrexed (Alimta®), raltitrexed (Tomudex®), cladribine (Leustatin®), clofarabine (Clofarex®, Clolar®), mercaptopurine (Puri-Nethol®), capecitabine (Xeloda®), nelarabine (Arranon®), azacitidine (Vidaza®) and gemcitabine (Gemzar®). Preferred antimetabolites include, e.g., 5-fluorouracil (Adrucil®, Efudex®, Fluoroplex®), floxuridine (FUDF®), capecitabine (Xeloda®), pemetrexed (Alimta®), raltitrexed (Tomudex®) and gemcitabine (Gemzar®).

[1011] Exemplary alkylating agents include, without limitation, nitrogen mustards, ethylenimine derivatives, alkyl sulfonates, nitrosoureas and triazenes): uracil mustard (Aminouracil Mustard®, Chlorethaminacil®, Demethyldopan®, Desmethyldopan®, Haemanthamine®, Nordopan®, Uracil nitrogen Mustard®, Uracillost®, Uracilmostaza®, Uramustin®, Uramustine®), chlormethine (Mustargen®), cyclophosphamide (Cytoxan®, Neosar®, Clafen®, Endoxan®, Procytox®, Revimmune™), ifosfamide (Mitoxana®), melphalan (Alkeran®), Chlorambucil (Leukeran®), pipobroman (Amedel®, Vercyte®), triethylenemelamine (Hemel®, Hexalen®, Hexastat®), triethylenethiophosphoramine, Temozolomide (Temodar®), thiotepa (Thioplex®), busulfan (Busilvex®, Myleran®), carmustine (BiCNU®), lomustine (CeeNU®), streptozocin (Zanosar®), and Dacarbazine (DTIC-Dome®). Additional exemplary alkylating agents include, without limitation, Oxaliplatin (Eloxatin®); Temozolomide (Temodar® and Temodal®); Dactinomycin (also known as actinomycin-D, Cosmegen®); Melphalan (also known as L-PAM, L-sarcolysin, and phenylalanine mustard, Alkeran®); Altretamine (also known as hexamethylmelamine (HMM), Hexalen®); Carmustine (BiCNU®); Bendamustine (Treanda®); Busulfan (Busulfex® and Myleran®); Carboplatin (Paraplatin®); Lomustine (also known as CCNU, CeeNU®); Cisplatin (also known as CDDP, Platinol® and Platinol®-AQ); Chlorambucil (Leukeran®); Cyclophosphamide (Cytoxan® and Neosar®); Dacarbazine (also known as DTIC, DIC and imidazole carboxamide, DTIC-Dome®); Altretamine (also known as hexamethylmelamine (HMM), Hexalen®); Ifosfamide (Ifex®); Prednumustine; Procarbazine (Matulane®); Mechlorethamine (also known as nitrogen mustard, mustine and mechloroethamine hydrochloride, Mustargen®); Streptozocin (Zanosar®); Thiotepa (also known as thiophosphoamide, TESPA and TSPA, Thioplex®); Cyclophosphamide (Endoxan®, Cytoxan®, Neosar®, Procytox®, Revimmune®); and Bendamustine HCl (Treanda®).

[1012] In embodiments, a CAR-expressing cell described herein is administered to a subject in combination with fludarabine, cyclophosphamide, and/or rituximab. In embodiments, a CAR-expressing cell described herein is administered to a subject in combination with fludarabine, cyclophosphamide, and rituximab (FCR). In embodiments, the subject has CLL. For example, the subject has a deletion in the short arm of chromosome 17 (del(17p), e.g., in a leukemic cell). In other examples, the subject does not have a del(17p). In embodiments, the subject comprises a leukemic cell comprising a mutation in the immunoglobulin heavy-chain variable-region (IgVH) gene. In other embodiments, the subject does not comprise a leukemic cell comprising a mutation in the immunoglobulin heavy-chain variable-region (IgVH) gene. In embodiments, the fludarabine is administered at a dosage of about 10-50 mg/m² (e.g., about 10-15, 15-20, 20-25, 25-30, 30-35, 35-40, 40-45, or 45-50 mg/m²), e.g., intravenously. In embodiments, the cyclophosphamide is administered at a dosage of about 200-300 mg/m² (e.g., about 200-225, 225-250, 250-275, or 275-300 mg/m²), e.g., intravenously. In embodiments, the rituximab is administered at a dosage of about 400-600 mg/m2 (e.g., 400-450, 450-500, 500-550, or 550-600 mg/m²), e.g., intravenously.

[1013] In embodiments, a CAR-expressing cell described herein is administered to a subject in combination with bendamustine and rituximab. In embodiments, the subject has CLL. For example, the subject has a deletion in the short arm of chromosome 17 (del(17p), e.g., in a leukemic cell). In other examples, the subject does not have a del(17p). In embodiments, the subject comprises a leukemic cell comprising a mutation in the immunoglobulin heavy-chain variable-region (IgVH) gene. In other embodiments, the subject does not comprise a leukemic cell comprising a mutation in the immunoglobulin heavy-chain variable-region (IgVH) gene. In embodiments, the bendamustine is administered at a dosage of about 70-110 mg/m2 (e.g., 70-80, 80-90, 90-100, or 100-110 mg/m2), e.g., intravenously. In embodiments, the rituximab is administered at a dosage of about 400-600 mg/m2 (e.g., 400-450, 450-500, 500-550, or 550-600 mg/m²), e.g., intravenously.

[1014] In embodiments, a CAR-expressing cell described herein is administered to a subject in combination with rituximab, cyclophosphamide, doxorubicine, vincristine, and/or a corticosteroid (e.g., prednisone). In embodiments, a CAR-expressing cell described herein is administered to a subject in combination with rituximab, cyclophosphamide, doxorubicine, vincristine, and prednisone (R-CHOP). In embodiments, the subject has diffuse large B-cell lymphoma (DLBCL). In embodiments, the subject has nonbulky limited-stage DLBCL (e.g., comprises a tumor having a size/diameter of less than 7 cm). In embodiments, the subject is treated with radiation in combination with the R-CHOP. For example, the subject is administered R-CHOP (e.g., 1-6 cycles, e.g., 1, 2, 3, 4, 5, or 6 cycles of R-CHOP), followed by radiation. In some cases, the subject is administered R-CHOP (e.g., 1-6 cycles, e.g., 1, 2, 3, 4, 5, or 6 cycles of R-CHOP) following radiation.

[1015] In embodiments, a CAR-expressing cell described herein is administered to a subject in combination with etoposide, prednisone, vincristine, cyclophosphamide, doxorubicin, and/or rituximab. In embodiments, a CAR-expressing cell described herein is administered to a subject in combination with etoposide, prednisone, vincristine, cyclophosphamide, doxorubicin, and rituximab (EPOCH-R). In embodiments, a CAR-expressing cell described herein is administered to a subject in combination with dose-adjusted EPOCH-R (DA-EPOCH-R). In embodiments, the subject has a B cell lymphoma, e.g., a Myc-rearranged aggressive B cell lymphoma.

[1016] In embodiments, a CAR-expressing cell described herein is administered to a subject in combination with rituximab and/or lenalidomide. Lenalidomide ((RS)-3-(4-Amino-1-oxo 1,3-dihydro-2H-isoindol-2-yl)piperidine-2,6-dione) is an immunomodulator. In embodiments, a CAR-expressing cell described herein is administered to a subject in combination with rituximab and lenalidomide. In embodiments, the subject has follicular lymphoma (FL) or mantle cell lymphoma (MCL). In embodiments, the subject has FL and has not previously been treated with a cancer therapy. In embodiments, lenalidomide is administered at a dosage of about 10-20 mg (e.g., 10-15 or 15-20 mg), e.g., daily. In embodiments, rituximab is administered at a dosage of about 350-550 mg/m² (e.g., 350-375, 375-400, 400-425, 425-450, 450-475, or 475-500 mg/m²), e.g., intravenously.

[1017] Exemplary mTOR inhibitors include, e.g., temsirolimus; ridaforolimus (formally known as deforolimus, (1R,2R,4S)-4-[(2R)-2 [(1R,9S,12S,15R,16E,18R,19R,21R,23S,24E,26E,28Z,30S,32S,35R)-1,18-dihydroxy-19,30-dimethoxy-15,17,21,23,29,35-hexamethyl-2,3,10,14,20-pentaoxo-11,36-dioxa-4-azatricyclo[30.3.1.0^{4.9}] hexatriaconta-16,24,26,28-tetraen-12-yl]propyl]-2-methoxycyclohexyl dimethylphosphinate, also known as AP23573 and MK8669, and described in PCT Publication No. WO 03/064383); everolimus (Afinitor® or RAD001); rapamycin (AY22989, Sirolimus®); simapimod (CAS 164301-51-3); emsirolimus, (5-{2,4-Bis[(3S)-3-methylmorpholin-4-yl]pyrido[2,3-d]pyrimidin-7-yl}-2-methoxyphenyl)methanol (AZD8055); 2-Amino-8-[trans-4-(2-hydroxyethoxy)cyclohexyl]-6-(6-methoxy-3-pyridinyl)-4-methyl-pyrido[2,3-d]pyrimidin-7(8H)-one (PF04691502, CAS 1013101-36-4); and N²-[1,4-dioxo-4-[[4-(4-oxo-8-phenyl-4H-1-benzopyran-2-yl)morpholinium-4-yl]methoxy]butyl]-L-arginylglycyl-L-α-aspartylL-serine-, inner salt (SF1126, CAS 936487-67-1) (SEQ ID NO: 1316), and XL765.

[1018] Exemplary immunomodulators include, e.g., afutuzumab (available from Roche®); pegfilgrastim (Neulasta®); lenalidomide (CC-5013, Revlimid®); thalidomide (Thalomid®), actimid (CC4047); and IRX-2 (mixture of human cytokines including interleukin 1, interleukin 2, and interferon γ, CAS 951209-71-5, available from IRX Therapeutics).

[1019] Exemplary anthracyclines include, e.g., doxorubicin (Adriamycin® and Rubex®); bleomycin (Lenoxane®); daunorubicin (dauorubicin hydrochloride, daunomycin, and rubidomycin hydrochloride, Cerubidine®); daunorubicin liposomal (daunorubicin citrate liposome, DaunoXome®); mitoxantrone (DHAD, Novantrone®); epirubicin (Ellence™); idarubicin (Idamycin®, Idamycin PFS®); mitomycin C (Mutamycin®); geldanamycin; herbimycin; ravidomycin; and desacetylravidomycin.

[1020] Exemplary vinca alkaloids include, e.g., vinorelbine tartrate (Navelbine®), Vincristine (Oncovin®), and Vindesine (Eldisine®)); vinblastine (also known as vinblastine sulfate, vincaleukoblastine and VLB, Alkaban-AQ® and Velban®); and vinorelbine (Navelbine®).

[1021] Exemplary proteosome inhibitors include bortezomib (Velcade®); carfilzomib (PX-171-007, (S)-4-Methyl-N—((S)-1-(((S)-4-methyl-1-((R)-2-methyloxiran-2-yl)-1-oxopentan-2-yl)amino)-1-oxo-3-phenylpropan-2-yl)-2-((S)-2-(2-morpholinoacetamido)-4-phenylbutanamido)-pentanamide); marizomib (NPI-0052); ixazomib citrate (MLN-9708); delanzomib (CEP-18770); and 0-Methyl-N-[(2-methyl-5-thiazolyl)carbonyl]-L-seryl-O-methyl-N-R1S)-2-[(2R)-2-methyl-2-oxiranyl]-2-oxo-1-(phenylmethyl)ethyl]-L-serinamide (ONX-0912).

[1022] In embodiments, a CAR-expressing cell described herein is administered to a subject in combination with brentuximab. Brentuximab is an antibody-drug conjugate of anti-CD30 antibody and monomethyl auristatin E. In embodiments, the subject has Hodgkin's lymphoma (HL), e.g., relapsed or refractory HL. In embodiments, the subject comprises CD30+ HL. In embodiments, the subject has undergone an autologous stem cell transplant (ASCT). In embodiments, the subject has not undergone an ASCT. In embodiments, brentuximab is administered at a dosage of about 1-3 mg/kg (e.g., about 1-1.5, 1.5-2, 2-2.5, or 2.5-3 mg/kg), e.g., intravenously, e.g., every 3 weeks.

[1023] In embodiments, a CAR-expressing cell described herein is administered to a subject in combination with brentuximab and dacarbazine or in combination with brentuximab and bendamustine. Dacarbazine is an alkylating agent with a chemical name of 5-(3,3-Dimethyl-1-triazenyl)imidazole-4-carboxamide. Bendamustine is an alkylating agent with a chemical name of 4-[5-[Bis(2-chloroethyl)amino]-1-methylbenzimidazol-2-yl]butanoic acid. In embodiments, the subject has Hodgkin's lymphoma (HL). In embodiments, the subject has not previously been treated with a cancer therapy. In embodiments, the subject is at least 60 years of age, e.g., 60, 65, 70, 75, 80, 85, or older. In embodiments, dacarbazine is administered at a dosage of about 300-450 mg/m² (e.g., about 300-325, 325-350, 350-375, 375-400, 400-425, or 425-450 mg/m²), e.g., intravenously. In embodiments, bendamustine is administered at a dosage of about 75-125 mg/m2 (e.g., 75-100 or 100-125 mg/m², e.g., about 90 mg/m²), e.g., intravenously. In embodiments, brentuximab is administered at a dosage of about 1-3 mg/kg (e.g., about 1-1.5, 1.5-2, 2-2.5, or 2.5-3 mg/kg), e.g., intravenously, e.g., every 3 weeks.

[1024] In some embodiments, a CAR-expressing cell described herein is administered to a subject in combination with a CD20 inhibitor, e.g., an anti-CD20 antibody (e.g., an anti-CD20 mono- or bispecific antibody) or a fragment thereof. Exemplary anti-CD20 antibodies include but are not limited to rituximab, ofatumumab, ocrelizumab, veltuzumab, obinutuzumab, TRU-015 (Trubion Pharmaceuticals), ocaratuzumab, and Pro131921 (Genentech). See, e.g., Lim et al. Haematologica. 95.1(2010):135-43.

[1025] In some embodiments, the anti-CD20 antibody comprises rituximab. Rituximab is a chimeric mouse/human monoclonal antibody IgG1 kappa that binds to CD20 and causes cytolysis of a CD20 expressing cell, e.g., as described in accessdata.fda.gov/drugsatfda_docs/label/2010/103705s5311lbl.pdf. In embodiments, a CAR-expressing cell described herein is administered to a subject in combination with rituximab. In embodiments, the subject has CLL or SLL.

[1026] In some embodiments, rituximab is administered intravenously, e.g., as an intravenous infusion. For example, each infusion provides about 500-2000 mg (e.g., about 500-550, 550-600, 600-650, 650-700, 700-750, 750-800, 800-850, 850-900, 900-950, 950-1000, 1000-1100, 1100-1200, 1200-1300, 1300-1400, 1400-1500, 1500-1600, 1600-1700, 1700-1800, 1800-1900, or 1900-2000 mg) of rituximab. In some embodiments, rituximab is administered at a dose of 150 mg/m² to 750 mg/m², e.g., about 150-175 mg/m², 175-200 mg/m², 200-225 mg/m², 225-250 mg/m², 250-300 mg/m², 300-325 mg/m², 325-350 mg/m², 350-375 mg/m², 375-400 mg/m², 400-425 mg/m², 425-450 mg/m², 450-475 mg/m², 475-500 mg/m², 500-525 mg/m², 525-550 mg/m², 550-575 mg/m², 575-600 mg/m², 600-625 mg/m², 625-650 mg/m², 650-675 mg/m², or 675-700 mg/m2, where m² indicates the body surface area of the subject. In some embodiments, rituximab is administered at a dosing interval of at least 4 days, e.g., 4, 7, 14, 21, 28, 35 days, or more. For example, rituximab is administered at a dosing interval of at least 0.5 weeks, e.g., 0.5, 1, 2, 3, 4, 5, 6, 7, 8 weeks, or more. In some embodiments, rituximab is administered at a dose and dosing interval described herein for a period of time, e.g., at least 2 weeks, e.g., at least 2, 3, 4, 5, 6, 7, 8, 9, 10, 11, 12, 13, 14, 15, 16, 17, 18, 19, 20 weeks, or greater. For example, rituximab is administered at a dose and dosing interval described herein for a total of at least 4 doses per treatment cycle (e.g., at least 4, 5, 6, 7, 8, 9, 10, 11, 12, 13, 14, 15, 16, or more doses per treatment cycle).

[1027] In some embodiments, the anti-CD20 antibody comprises ofatumumab. Ofatumumab is an anti-CD20 IgG1κ human monoclonal antibody with a molecular weight of approximately 149 kDa. For example, ofatumumab is generated using transgenic mouse and hybridoma technology and is expressed and purified from a recombinant murine cell line (NS0). See, e.g., accessdatafda.gov/drugsatfda_docs/label/2009/125326lbl.pdf; and Clinical Trial Identifier number NCT01363128, NCT01515176, NCT01626352, and NCT01397591. In embodiments, a CAR-expressing cell described herein is administered to a subject in combination with ofatumumab. In embodiments, the subject has CLL or SLL.

[1028] In some embodiments, ofatumumab is administered as an intravenous infusion. For example, each infusion provides about 150-3000 mg (e.g., about 150-200, 200-250, 250-300, 300-350, 350-400, 400-450, 450-500, 500-550, 550-600, 600-650, 650-700, 700-750, 750-800, 800-850, 850-900, 900-950, 950-1000, 1000-1200, 1200-1400, 1400-1600, 1600-1800, 1800-2000, 2000-2200, 2200-2400, 2400-2600, 2600-2800, or 2800-3000 mg) of ofatumumab. In embodiments, ofatumumab is administered at a starting dosage of about 300 mg, followed by 2000 mg, e.g., for about 11 doses, e.g., for 24 weeks. In some embodiments, ofatumumab is administered at a dosing interval of at least 4 days, e.g., 4, 7, 14, 21, 28, 35 days, or more. For example, ofatumumab is administered at a dosing interval of at least 1 week, e.g., 1, 2, 3, 4, 5, 6, 7, 8, 9, 10, 11, 12, 24, 26, 28, 20, 22, 24, 26, 28, 30 weeks, or more. In some embodiments, ofatumumab is administered at a dose and dosing interval described herein for a period of time, e.g., at least 1 week, e.g., 1, 2, 3, 4, 5, 6, 7, 8, 9, 10, 11, 12, 13, 14, 15, 16, 17, 18, 19, 20, 22, 24, 26, 28, 30, 40, 50, 60 weeks or greater, or 1, 2, 3, 4, 5, 6, 7, 8, 9, 10, 11, 12 months or greater, or 1, 2, 3, 4, 5 years or greater. For example, ofatumumab is administered at a dose and dosing interval described herein for a total of at least 2 doses per treatment cycle (e.g., at least 2, 3, 4, 5, 6, 7, 8, 9, 10, 11, 12, 13, 14, 15, 16, 18, 20, or more doses per treatment cycle).

[1029] In some cases, the anti-CD20 antibody comprises ocrelizumab. Ocrelizumab is a humanized anti-CD20 monoclonal antibody, e.g., as described in Clinical Trials Identifier Nos. NCT00077870, NCT01412333, NCT00779220, NCT00673920, NCT01194570, and Kappos et al. Lancet. 19.378(2011):1779-87.

[1030] In some cases, the anti-CD20 antibody comprises veltuzumab. Veltuzumab is a humanized monoclonal antibody against CD20. See, e.g., Clinical Trial Identifier No. NCT00547066, NCT00546793, NCT01101581, and Goldenberg et al. Leuk Lymphoma. 51(5)(2010):747-55.

[1031] In some cases, the anti-CD20 antibody comprises GA101. GA101 (also called obinutuzumab or R05072759) is a humanized and glyco-engineered anti-CD20 monoclonal antibody. See, e.g., Robak. Curr. Opin. Investig. Drugs. 10.6(2009):588-96; Clinical Trial Identifier Numbers: NCT01995669, NCT01889797, NCT02229422, and NCT01414205; and accessdata.fda.gov/drugsatfda_docs/label/2013/125486s000lbl.pdf.

[1032] In some cases, the anti-CD20 antibody comprises AME-133v. AME-133v (also called LY2469298 or ocaratuzumab) is a humanized IgG1 monoclonal antibody against CD20 with increased affinity for the FcγRIIIa receptor and an enhanced antibody dependent cellular cytotoxicity (ADCC) activity compared with rituximab. See, e.g., Robak et al. BioDrugs 25.1(2011):13-25; and Forero-Torres et al. Clin Cancer Res. 18.5(2012):1395-403.

[1033] In some cases, the anti-CD20 antibody comprises PRO131921. PRO131921 is a humanized anti-CD20 monoclonal antibody engineered to have better binding to FcγRIIIa and enhanced ADCC compared with rituximab. See, e.g., Robak et al. BioDrugs 25.1(2011):13-25; and Casulo et al. Clin Immunol. 154.1(2014):37-46; and Clinical Trial Identifier No. NCT00452127.

[1034] In some cases, the anti-CD20 antibody comprises TRU-015. TRU-015 is an anti-CD20 fusion protein derived from domains of an antibody against CD20. TRU-015 is smaller than monoclonal antibodies, but retains Fc-mediated effector functions. See, e.g., Robak et al. BioDrugs 25.1(2011):13-25. TRU-015 contains an anti-CD20 single-chain variable fragment (scFv) linked to human IgG1 hinge, CH2, and CH3 domains but lacks CH1 and CL domains.

[1035] In some embodiments, an anti-CD20 antibody described herein is conjugated or otherwise bound to a therapeutic agent, e.g., a chemotherapeutic agent (e.g., cytoxan, fludarabine, histone deacetylase inhibitor, demethylating agent, peptide vaccine, anti-tumor antibiotic, tyrosine kinase inhibitor, alkylating agent, anti-microtubule or anti-mitotic agent), anti-allergic agent, anti-nausea agent (or anti-emetic), pain reliever, or cytoprotective agent described herein.

[1036] In embodiments, a CAR-expressing cell described herein is administered to a subject in combination with a B-cell lymphoma 2 (BCL-2) inhibitor (e.g., venetoclax, also called ABT-199 or GDC-0199) and/or rituximab. In embodiments, a CAR-expressing cell described herein is administered to a subject in combination with venetoclax and rituximab. Venetoclax is a small molecule that inhibits the anti-apoptotic protein, BCL-2. The structure of venetoclax (4-(4-{[2-(4-chlorophenyl)-4,4-dimethylcyclohex-1-en-1-yl]methyl}piperazin-1-yl)-N-({3-nitro-4-[(tetrahydro-2H-pyran-4-ylmethyl)amino]phenyl}sulfonyl)-2-(1H-pyrrolo[2,3-b]pyridin-5-yloxy)benzamide) is shown below.

[chemical structure]

[1037] In embodiments, the subject has CLL. In embodiments, the subject has relapsed CLL, e.g., the subject has previously been administered a cancer therapy. In embodiments, venetoclax is administered at a dosage of about 15-600 mg (e.g., 15-20, 20-50, 50-75, 75-100, 100-200, 200-300, 300-400, 400-500, or 500-600 mg), e.g., daily. In embodiments, rituximab is administered at a dosage of about 350-550 mg/m2 (e.g., 350-375, 375-400, 400-425, 425-450, 450-475, or 475-500 mg/m2), e.g., intravenously, e.g., monthly.

[1038] In some embodiments, one or more CAR-expressing cells described herein is administered in combination with an oncolytic virus. In embodiments, oncolytic viruses are capable of selectively replicating in and triggering the death of or slowing the growth of a cancer cell. In some cases, oncolytic viruses have no effect or a minimal effect on non-cancer cells. An oncolytic virus includes but is not limited to an oncolytic adenovirus, oncolytic Herpes Simplex Viruses, oncolytic retrovirus, oncolytic parvovirus, oncolytic vaccinia virus, oncolytic Sinbis virus, oncolytic influenza virus, or oncolytic RNA virus (e.g., oncolytic reovirus, oncolytic Newcastle Disease Virus (NDV), oncolytic measles virus, or oncolytic vesicular stomatitis virus (VSV)).

[1039] In some embodiments, the oncolytic virus is a virus, e.g., recombinant oncolytic virus, described in US2010/0178684 A1, which is incorporated herein by reference in its entirety. In some embodiments, a recombinant oncolytic virus comprises a nucleic acid sequence (e.g., heterologous nucleic acid sequence) encoding an inhibitor of an immune or inflammatory response, e.g., as described in US2010/0178684 A1, incorporated herein by reference in its entirety. In embodiments, the recombinant oncolytic virus, e.g., oncolytic NDV, comprises a pro-apoptotic protein (e.g., apoptin), a cytokine (e.g., GM-CSF, interferon-gamma, interleukin-2 (IL-2), tumor necrosis factor-alpha), an immunoglobulin (e.g., an antibody against ED-B firbonectin), tumor associated antigen, a bispecific adapter protein (e.g., bispecific antibody or antibody fragment directed against NDV HN protein and a T cell co-stimulatory receptor, such as CD3 or CD28; or fusion protein between human IL-2 and single chain antibody directed against NDV HN protein). See, e.g., Zamarin et al. Future Microbiol. 7.3(2012):347-67, incorporated herein by reference in its entirety. In some embodiments, the oncolytic virus is a chimeric oncolytic NDV described in U.S. Pat. No. 8,591,881 B2, US 2012/0122185 A1, or US 2014/0271677 A1, each of which is incorporated herein by reference in their entireties.

[1040] In some embodiments, the oncolytic virus comprises a conditionally replicative adenovirus (CRAd), which is designed to replicate exclusively in cancer cells. See, e.g., Alemany et al. Nature Biotechnol. 18(2000):723-27. In some embodiments, an oncolytic adenovirus comprises one described in Table 1 on page 725 of Alemany et al., incorporated herein by reference in its entirety.

[1041] Exemplary oncolytic viruses include but are not limited to the following:
[1042] Group B Oncolytic Adenovirus (ColoAd1) (PsiOxus Therapeutics Ltd.) (see, e.g., Clinical Trial Identifier: NCT02053220);
[1043] ONCOS-102 (previously called CGTG-102), which is an adenovirus comprising granulocyte-macrophage colony stimulating factor (GM-CSF) (Oncos Therapeutics) (see, e.g., Clinical Trial Identifier: NCT01598129);
[1044] VCN-01, which is a genetically modified oncolytic human adenovirus encoding human PH20 hyaluronidase (VCN Biosciences, S.L.) (see, e.g., Clinical Trial Identifiers: NCT02045602 and NCT02045589);
[1045] Conditionally Replicative Adenovirus ICOVIR-5, which is a virus derived from wild-type human adenovirus serotype 5 (Had5) that has been modified to selectively replicate in cancer cells with a deregulated retinoblastoma/E2F pathway (Institut Català d'Oncologia) (see, e.g., Clinical Trial Identifier: NCT01864759);
[1046] Celyvir, which comprises bone marrow-derived autologous mesenchymal stem cells (MSCs) infected with ICOVIR5, an oncolytic adenovirus (Hospital Infantil Universitario Nino Jesús, Madrid, Spain/Ramon Alemany) (see, e.g., Clinical Trial Identifier: NCT01844661);
[1047] CG0070, which is a conditionally replicating oncolytic serotype 5 adenovirus (Ad5) in which human E2F-1 promoter drives expression of the essential Ela viral genes, thereby restricting viral replication and cytotoxicity to Rb pathway-defective tumor cells (Cold Genesys, Inc.) (see, e.g., Clinical Trial Identifier: NCT02143804); or
[1048] DNX-2401 (formerly named Delta-24-RGD), which is an adenovirus that has been engineered to replicate selectively in retinoblastoma (Rb)-pathway deficient cells and to infect cells that express certain RGD-binding integrins more efficiently (Clinica Universidad de Navarra, Universidad de Navarra/DNAtrix, Inc.) (see, e.g., Clinical Trial Identifier: NCT01956734).

[1049] In some embodiments, an oncolytic virus described herein is administering by injection, e.g., subcutaneous, intra-arterial, intravenous, intramuscular, intrathecal, or intraperitoneal injection. In embodiments, an oncolytic virus described herein is administered intratumorally, transdermally, transmucosally, orally, intranasally, or via pulmonary administration.

[1050] In an embodiment, cells expressing a CAR described herein are administered to a subject in combination with a molecule that decreases the Treg cell population. Methods that decrease the number of (e.g., deplete) Treg cells are known in the art and include, e.g., CD25 depletion, cyclophosphamide administration, modulating GITR function. Without wishing to be bound by theory, it is believed that reducing the number of Treg cells in a subject prior to apheresis or prior to administration of a CAR-expressing cell described herein reduces the number of unwanted immune cells (e.g., Tregs) in the tumor microenvironment and reduces the subject's risk of relapse.

[1051] In an embodiment, a CAR-expressing cell described herein is administered to a subject in combination with a molecule that decreases the Treg cell population. Methods that decrease the number of (e.g., deplete) Treg cells are known in the art and include, e.g., CD25 depletion, cyclophosphamide administration, and modulating GITR function. Without wishing to be bound by theory, it is believed that reducing the number of Treg cells in a subject prior to apheresis or prior to administration of a CAR-expressing cell described herein reduces the number of unwanted immune cells (e.g., Tregs) in the tumor microenvironment and reduces the subject's risk of relapse. In one embodiment, CAR-expressing cells described herein are administered to a subject in combination with a molecule targeting GITR and/or modulating GITR functions, such as a GITR agonist and/or a GITR antibody that depletes regulatory T cells (Tregs). In one embodiment, CAR-expressing cells described herein are administered to a subject in combination with cyclophosphamide. In one embodiment, the GITR binding molecule and/or molecule modulating GITR function (e.g., GITR agonist and/or Treg depleting GITR antibodies) is administered prior to the CAR-expressing cells. For example, in one embodiment, the GITR agonist can be administered prior to apheresis of the cells. In embodiments, cyclophosphamide is administered to the subject prior to administration (e.g., infusion or re-infusion) of the CAR-expressing cell or prior to apheresis of the cells. In embodiments, cyclophosphamide and an anti-GITR antibody are administered to the subject prior to administration (e.g., infusion or re-infusion) of the CAR-expressing cell or prior to apheresis of the cells. In one embodiment, the subject has cancer (e.g., a solid cancer or a hematological cancer such as ALL or CLL). In one embodiment, the subject has CLL. In embodiments, the subject has a solid cancer, e.g., a solid cancer described herein.

[1052] In one embodiment, the combination of a CD19 CAR expressing cell described herein and one or more B-cell inhibitor described herein is administered to a subject in combination with a GITR agonist, e.g., a GITR agonist described herein. In one embodiment, the GITR agonist is administered prior to the CAR-expressing cell, e.g., CD19 CAR-expressing cells. For example, in one embodiment, the GITR agonist can be administered prior to apheresis of the cells. In one embodiment, the subject has CLL.

[1053] In one embodiment, a CAR expressing cell described herein is administered to a subject in combination with a GITR agonist, e.g., a GITR agonist described herein. In one embodiment, the GITR agonist is administered prior to the CAR-expressing cell. For example, in one embodiment, the GITR agonist can be administered prior to apheresis of the cells.

[1054] Exemplary GITR agonists include, e.g., GITR fusion proteins and anti-GITR antibodies (e.g., bivalent anti-GITR antibodies) such as, e.g., a GITR fusion protein described in U.S. Pat. No. 6,111,090, European Patent No.: 090505B1, U.S. Pat. No. 8,586,023, PCT Publication Nos.: WO 2010/003118 and 2011/090754, or an anti-GITR antibody described, e.g., in U.S. Pat. No. 7,025,962, European Patent No.: 1947183B1, U.S. Pat. Nos. 7,812,135, 8,388,967, 8,591,886, European Patent No.: EP 1866339, PCT Publication No.: WO 2011/028683, PCT Publication No.: WO 2013/039954, PCT Publication No.: WO2005/007190, PCT Publication No.: WO 2007/133822, PCT Publication No.: WO2005/055808, PCT Publication No.: WO 99/40196, PCT Publication No.: WO 2001/03720, PCT Publication No.: WO99/20758, PCT Publication No.: WO2006/083289, PCT Publication No.: WO 2005/115451, U.S. Pat. No. 7,618,632, and PCT Publication No.: WO 2011/051726.

[1055] In one embodiment, a CAR expressing cell described herein is administered to a subject in combination with a protein tyrosine phosphatase inhibitor, e.g., a protein tyrosine phosphatase inhibitor described herein. In one embodiment, the protein tyrosine phosphatase inhibitor is an SHP-1 inhibitor, e.g., an SHP-1 inhibitor described herein, such as, e.g., sodium stibogluconate. In one embodiment, the protein tyrosine phosphatase inhibitor is an SHP-2 inhibitor, e.g., an SHP-2 inhibitor described herein.

[1056] In one embodiment, a CAR-expressing cell described herein optionally in combination with one or more B-cell inhibitor can be used in combination with a kinase inhibitor. In one embodiment, the kinase inhibitor is a CDK4 inhibitor, e.g., a CDK4 inhibitor described herein, e.g., a CD4/6 inhibitor, such as, e.g., 6-Acetyl-8-cyclopentyl-5-methyl-2-(5-piperazin-1-yl-pyridin-2-ylamino)-8H-pyrido[2,3-d]pyrimidin-7-one, hydrochloride (also referred to as palbociclib or PD0332991). In one embodiment, the kinase inhibitor is a BTK inhibitor, e.g., a BTK inhibitor described herein, such as, e.g., ibrutinib. In one embodiment, the kinase inhibitor is an mTOR inhibitor, e.g., an mTOR inhibitor described herein, such as, e.g., rapamycin, a rapamycin analog, OSI-027. The mTOR inhibitor can be, e.g., an mTORC1 inhibitor and/or an mTORC2 inhibitor, e.g., an mTORC1 inhibitor and/or mTORC2 inhibitor described herein. In one embodiment, the kinase inhibitor is a MNK inhibitor, e.g., a MNK inhibitor described herein, such as, e.g., 4-amino-5-(4-fluoroanilino)-pyrazolo[3,4-d] pyrimidine. The MNK inhibitor can be, e.g., a MNK1a, MNK1b, MNK2a and/or MNK2b inhibitor.

[1057] In one embodiment, the kinase inhibitor is a CDK4 inhibitor selected from aloisine A; flavopiridol or HMR-1275, 2-(2-chlorophenyl)-5,7-dihydroxy-8-[(3S,4R)-3-hydroxy-1-methyl-4-piperidinyl]-4-chromenone; crizotinib (PF-02341066; 2-(2-Chlorophenyl)-5,7-dihydroxy-8-[(2R,3S)-2-(hydroxymethyl)-1-methyl-3-pyrrolidinyl]-4H-1-benzopyran-4-one, hydrochloride (P276-00); 1-methyl-5-[[2-[5-(trifluoromethyl)-1H-imidazol-2-yl]-4-pyridinyl]oxy]-N-[4-(trifluoromethyl)phenyl]-1H-benzimidazol-2-amine (RAF265); indisulam (E7070); roscovitine (CYC202); palbociclib (PD0332991); dinaciclib (SCH727965); N-[5-[[(5-tert-butyloxazol-2-yl)methyl]thio]thiazol-2-yl]piperidine-4-carboxamide (BMS 387032); 4-[[9-chloro-7-(2,6-difluorophenyl)-5H-pyrimido[5,4-d][2]benzazepin-2-yl]amino]-benzoic acid (MLN8054); 5-[3-(4,6-difluoro-1H-benzimidazol-2-yl)-1H-indazol-5-yl]-N-ethyl-4-methyl-3-pyridinemethanamine (AG-024322); 4-(2,6-dichlorobenzoylamino)-1H-pyrazole-3-carboxylic acid N-(piperidin-4-yl)amide (AT7519); 4-[2-methyl-1-(1-methylethyl)-1H-imidazol-5-yl]-N-[4-(methylsulfonyl)phenyl]-2-pyrimidinamine (AZD5438); and XL281 (BMS908662).

[1058] In one embodiment, the kinase inhibitor is a CDK4 inhibitor, e.g., palbociclib (PD0332991), and the palbociclib is administered at a dose of about 50 mg, 60 mg, 70 mg, 75 mg, 80 mg, 90 mg, 100 mg, 105 mg, 110 mg, 115 mg, 120 mg, 125 mg, 130 mg, 135 mg (e.g., 75 mg, 100 mg or 125 mg) daily for a period of time, e.g., daily for 14-21 days of a 28 day cycle, or daily for 7-12 days of a 21 day cycle. In one embodiment, 1, 2, 3, 4, 5, 6, 7, 8, 9, 10, 11, 12 or more cycles of palbociclib are administered.

[1059] In embodiments, a CAR-expressing cell described herein is administered to a subject in combination with a cyclin-dependent kinase (CDK) 4 or 6 inhibitor, e.g., a CDK4 inhibitor or a CDK6 inhibitor described herein. In embodiments, a CAR-expressing cell described herein is administered to a subject in combination with a CDK4/6 inhibitor (e.g., an inhibitor that targets both CDK4 and CDK6), e.g., a CDK4/6 inhibitor described herein. In an embodiment, the subject has MCL. MCL is an aggressive cancer that is poorly responsive to currently available therapies, i.e., essentially incurable. In many cases of MCL, cyclin D1 (a regulator of CDK4/6) is expressed (e.g., due to chromosomal translocation involving immunoglobulin and Cyclin D1 genes) in MCL cells. Thus, without being bound by theory, it is thought that MCL cells are highly sensitive to CDK4/6 inhibition with high specificity (i.e., minimal effect on normal immune cells). CDK4/6 inhibitors alone have had some efficacy in treating MCL, but have only achieved partial remission with a high relapse rate. An exemplary CDK4/6 inhibitor is LEE011 (also called ribociclib), the structure of which is shown below.

[chemical structure]

[1060] Without being bound by theory, it is believed that administration of a CAR-expressing cell described herein with a CDK4/6 inhibitor (e.g., LEE011 or other CDK4/6 inhibitor described herein) can achieve higher responsiveness, e.g., with higher remission rates and/or lower relapse rates, e.g., compared to a CDK4/6 inhibitor alone.

[1061] In one embodiment, the kinase inhibitor is a BTK inhibitor selected from ibrutinib (PCI-32765); GDC-0834; RN-486; CGI-560; CGI-1764; HM-71224; CC-292; ONO-4059; CNX-774; and LFM-A13. In an embodiment, the BTK inhibitor does not reduce or inhibit the kinase activity of interleukin-2-inducible kinase (ITK), and is selected from GDC-0834; RN-486; CGI-560; CGI-1764; HM-71224; CC-292; ONO-4059; CNX-774; and LFM-A13.

[1062] In one embodiment, the kinase inhibitor is a BTK inhibitor, e.g., ibrutinib (PCI-32765). In embodiments, a CAR-expressing cell described herein is administered to a subject in combination with a BTK inhibitor (e.g., ibrutinib). In embodiments, a CAR-expressing cell described herein is administered to a subject in combination with ibrutinib (also called PCI-32765). The structure of ibrutinib (1-[(3R)-3-[4-Amino-3-(4-phenoxyphenyl)-1H-pyrazolo[3,4-d]pyrimidin-1-yl]piperidin-1-yl]prop-2-en-1-one) is shown below.

[chemical structure]

[1063] In embodiments, the subject has CLL, mantle cell lymphoma (MCL), or small lymphocytic lymphoma (SLL). For example, the subject has a deletion in the short arm of chromosome 17 (del(17p), e.g., in a leukemic cell). In other examples, the subject does not have a del(17p). In embodiments, the subject has relapsed CLL or SLL, e.g., the subject has previously been administered a cancer therapy (e.g., previously been administered one, two, three, or four prior cancer therapies). In embodiments, the subject has refractory CLL or SLL. In other embodiments, the subject has follicular lymphoma, e.g., relapse or refractory follicular lymphoma. In one embodiment, the kinase inhibitor is a BTK inhibitor, e.g., ibrutinib (PCI-32765), and the ibrutinib is administered at a dose of about 250 mg, 300 mg, 350 mg, 400 mg, 420 mg, 440 mg, 460 mg, 480 mg, 500 mg, 520 mg, 540 mg, 560 mg, 580 mg, 600 mg (e.g., 250 mg, 420 mg or 560 mg) daily for a period of time, e.g., daily for 21 day cycle, or daily for 28 day cycle. In one embodiment, 1, 2, 3, 4, 5, 6, 7, 8, 9, 10, 11, 12 or more cycles of ibrutinib are administered. In some embodiments, ibrutinib is administered in combination with rituximab. See, e.g., Burger et al. (2013) Ibrutinib In Combination With Rituximab (iR) Is Well Tolerated and Induces a High Rate Of Durable Remissions In Patients With High-Risk Chronic Lymphocytic Leukemia (CLL): New, Updated Results Of a Phase II Trial In 40 Patients, Abstract 675 presented at 55^{th} ASH Annual Meeting and Exposition, New Orleans, LA 7-10 December Without being bound by theory, it is thought that the addition of ibrutinib enhances the T cell proliferative response and may shift T cells from a T-helper-2 (Th2) to T-helper-1 (Th1) phenotype. Th1 and Th2 are phenotypes of helper T cells, with Th1 versus Th2 directing different immune response pathways. A Th1 phenotype is associated with proinflammatory responses, e.g., for killing cells, such as intracellular pathogens/viruses or cancerous cells, or perpetuating autoimmune responses. A Th2 phenotype is associated with eosinophil accumulation and anti-inflammatory responses. In some embodiments of the methods, uses, and compositions herein, the BTK inhibitor is a BTK inhibitor described in International Application WO/2015/079417, which is herein incorporated by reference in its entirety. For instance, in some embodiments, the BTK inhibitor is a compound of formula (I) or a pharmaceutically acceptable salt thereof;

[chemical structure]

wherein,
[1064] R1 is hydrogen, C1-C6 alkyl optionally substituted by hydroxy;
[1065] R2 is hydrogen or halogen;
[1066] R3 is hydrogen or halogen;
[1067] R4 is hydrogen;
[1068] R5 is hydrogen or halogen;
[1069] or R4 and R5 are attached to each other and stand for a bond, —CH2-, —CH2-CH2-, —CH═CH—, —CH═CH—CH2-; —CH2-CH═CH—; or —CH2-CH2-CH2-;
[1070] R6 and R7 stand independently from each other for H, C1-C6 alkyl optionally substituted by hydroxyl, C3-C6 cycloalkyl optionally substituted by halogen or hydroxy, or halogen;
[1071] R8, R9, R, R′, R10 and R11 independently from each other stand for H, or C1-C6 alkyl optionally substituted by C1-C6 alkoxy; or any two of R8, R9, R, R′, R10 and R11 together with the carbon atom to which they are bound may form a 3-6 membered saturated carbocyclic ring;
[1072] R12 is hydrogen or C1-C6 alkyl optionally substituted by halogen or C1-C6 alkoxy;
[1073] or R12 and any one of R8, R9, R, R′, R10 or R11 together with the atoms to which they are bound may form a 4, 5, 6 or 7 membered azacyclic ring, which ring may optionally be substituted by halogen, cyano, hydroxyl, C1-C6 alkyl or C1-C6 alkoxy;
[1074] n is 0 or 1; and
[1075] R13 is C2-C₆ alkenyl optionally substituted by C1-C6 alkyl, C1-C6 alkoxy or N,N-di-C1-C6 alkyl amino; C2-C₆ alkynyl optionally substituted by C1-C6 alkyl or C1-C6 alkoxy; or C2-C₆ alkylenyl oxide optionally substituted by C1-C6 alkyl.

[1076] In some embodiments, the BTK inhibitor of Formula I is chosen from: N-(3-(5-((1-Acryloylazetidin-3-yl)oxy)-6-aminopyrimidin-4-yl)-5-fluoro-2-methylphenyl)-4-cyclopropyl-2-fluorobenzamide; (E)-N-(3-(6-Amino-5-((1-(but-2-enoyl)azetidin-3-yl)oxy)pyrimidin-4-yl)-5-fluoro-2-methylphenyl)-4-cyclopropyl-2-fluorobenzamide; N-(3-(6-Amino-5-((1-propioloylazetidin-3-yl)oxy)pyrimidin-4-yl)-5-fluoro-2-methylphenyl)-4-cyclopropyl-2-fluorobenzamide; N-(3-(6-Amino-5-((1-(but-2-ynoyl)azetidin-3-yl)oxy)pyrimidin-4-yl)-5-fluoro-2-methylphenyl)-4-cyclopropyl-2-fluorobenzamide; N-(3-(5-((1-Acryloylpiperidin-4-yl)oxy)-6-aminopyrimidin-4-yl)-5-fluoro-2-methylphenyl)-4-cyclopropyl-2-fluorobenzamide; N-(3-(6-Amino-5-(2-(N-methylacrylamido)ethoxy)pyrimidin-4-yl)-5-fluoro-2-methylphenyl)-4-cyclopropyl-2-fluorobenzamide; (E)-N-(3-(6-Amino-5-(2-(N-methylbut-2-enamido)ethoxy)pyrimidin-4-yl)-5-fluoro-2-methylphenyl)-4-cyclopropyl-2-fluorobenzamide; N-(3-(6-Amino-5-(2-(N-methylpropiolamido)ethoxy)pyrimidin-4-yl)-5-fluoro-2-methylphenyl)-4-cyclopropyl-2-fluorobenzamide; (E)-N-(3-(6-Amino-5-(2-(4-methoxy-N-methylbut-2-enamido)ethoxy)pyrimidin-4-yl)-5-fluoro-2-methylphenyl)-4-cyclopropyl-2-fluorobenzamide; N-(3-(6-Amino-5-(2-(N-methylbut-2-ynamido)ethoxy)pyrimidin-4-yl)-5-fluoro-2-methylphenyl)-4-cyclopropyl-2-fluorobenzamide; N-(2-((4-Amino-6-(3-(4-cyclopropyl-2-fluorobenzamido)-5-fluoro-2-methylphenyl)pyrimidin-5-yl)oxy)ethyl)-N-methyloxirane-2-carboxamide; N-(2-((4-Amino-6-(3-(6-cyclopropyl-8-fluoro-1-oxoisoquinolin-2(1H)-yl)phenyl)pyrimidin-5-yl)oxy)ethyl)-N-methylacrylamide; N-(3-(5-(2-Acrylamidoethoxy)-6-aminopyrimidin-4-yl)-5-fluoro-2-methylphenyl)-4-cyclopropyl-2-fluorobenzamide; N-(3-(6-Amino-5-(2-(N-ethylacrylamido)ethoxy)pyrimidin-4-yl)-5-fluoro-2-methylphenyl)-4-cyclopropyl-2-fluorobenzamide; N-(3-(6-Amino-5-(2-(N-(2-fluoroethyl)acrylamido)ethoxy)pyrimidin-4-yl)-5-fluoro-2-methylphenyl)-4-cyclopropyl-2-fluorobenzamide; N-(3-(5-((1-Acrylamidocyclopropyl)methoxy)-6-aminopyrimidin-4-yl)-5-fluoro-2-methylphenyl)-4-cyclopropyl-2-fluorobenzamide; (S)-N-(3-(5-(2-Acrylamidopropoxy)-6-aminopyrimidin-4-yl)-5-fluoro-2-methylphenyl)-4-cyclopropyl-2-fluorobenzamide; (S)—N-(3-(6-Amino-5-(2-(but-2-ynamido)propoxy)pyrimidin-4-yl)-5-fluoro-2-methylphenyl)-4-cyclopropyl-2-fluorobenzamide; (S)—N-(3-(6-Amino-5-(2-(N-methylacrylamido)propoxy)pyrimidin-4-yl)-5-fluoro-2-methylphenyl)-4-cyclopropyl-2-fluorobenzamide; (S)—N-(3-(6-Amino-5-(2-(N-methylbut-2-ynamido)propoxy)pyrimidin-4-yl)-5-fluoro-2-methylphenyl)-4-cyclopropyl-2-fluorobenzamide; N-(3-(6-Amino-5-(3-(N-methylacrylamido)propoxy)pyrimidin-4-yl)-5-fluoro-2-methylphenyl)-4-cyclopropyl-2-fluorobenzamide; (S)—N-(3-(5-((1-Acryloylpyrrolidin-2-yl)methoxy)-6-aminopyrimidin-4-yl)-5-fluoro-2-methylphenyl)-4-cyclopropyl-2-fluorobenzamide; (S)—N-(3-(6-Amino-5-((1-(but-2-ynoyl)pyrrolidin-2-yl)methoxy)pyrimidin-4-yl)-5-fluoro-2-methylphenyl)-4-cyclopropyl-2-fluorobenzamide; (S)-2-(3-(5-((1-Acryloylpyrrolidin-2-yl)methoxy)-6-aminopyrimidin-4-yl)-5-fluoro-2-(hydroxymethyl)phenyl)-6-cyclopropyl-3,4-dihydroisoquinolin-1(2H)-one; N-(2-((4-Amino-6-(3-(6-cyclopropyl-1-oxo-3,4-dihydroisoquinolin-2(1H)-yl)-5-fluoro-2-(hydroxymethyl)phenyl)pyrimidin-5-yl)oxy)ethyl)-N-methylacrylamide; N-(3-(5-4(2S,4R)-1-Acryloyl-4-methoxypyrrolidin-2-yl)methoxy)-6-aminopyrimidin-4-yl)-5-fluoro-2-methylphenyl)-4-cyclopropyl-2-fluorobenzamide; N-(3-(6-Amino-5-(((2S,4R)-1-(but-2-ynoyl)-4-methoxypyrrolidin-2-yl)methoxy)pyrimidin-4-yl)-5-fluoro-2-methylphenyl)-4-cyclopropyl-2-fluorobenzamide; 2-(3-(5-(((2S,4R)-1-Acryloyl-4-methoxypyrrolidin-2-yl)methoxy)-6-aminopyrimidin-4-yl)-5-fluoro-2-(hydroxymethyl)phenyl)-6-cyclopropyl-3,4-dihydroisoquinolin-1(2H)-one; N-(3-(5-(((2S,4S)-1-Acryloyl-4-methoxypyrrolidin-2-yl)methoxy)-6-aminopyrimidin-4-yl)-5-fluoro-2-methylphenyl)-4-cyclopropyl-2-fluorobenzamide; N-(3-(6-Amino-5-(((2S,4S)-1-(but-2-ynoyl)-4-methoxypyrrolidin-2-yl)methoxy)pyrimidin-4-yl)-5-fluoro-2-methylphenyl)-4-cyclopropyl-2-fluorobenzamide; N-(3-(5-(((2S,4R)-1-Acryloyl-4-fluoropyrrolidin-2-yl)methoxy)-6-aminopyrimidin-4-yl)-5-fluoro-2-methylphenyl)-4-cyclopropyl-2-fluorobenzamide; N-(3-(6-Amino-5-(((2S,4R)-1-(but-2-ynoyl)-4-fluoropyrrolidin-2-yl)methoxy)pyrimidin-4-yl)-5-fluoro-2-methylphenyl)-4-cyclopropyl-2-fluorobenzamide; (S)—N-(3-(5-((1-Acryloylazetidin-2-yl)methoxy)-6-aminopyrimidin-4-yl)-5-fluoro-2-methylphenyl)-4-cyclopropyl-2-fluorobenzamide; (S)—N-(3-(6-Amino-5-((1-propioloylazetidin-2-yl)methoxy)pyrimidin-4-yl)-5-fluoro-2-methylphenyl)-4-cyclopropyl-2-fluorobenzamide; (S)-2-(3-(5-((1-Acryloylazetidin-2-yl)methoxy)-6-aminopyrimidin-4-yl)-5-fluoro-2-(hydroxymethyl)phenyl)-6-cyclopropyl-3,4-dihydroisoquinolin-1(2H)-one; (R)-N-(3-(5-((1-Acryloylazetidin-2-yl)methoxy)-6-aminopyrimidin-4-yl)-5-fluoro-2-methylphenyl)-4-cyclopropyl-2-fluorobenzamide; (R)-N-(3-(5-((1-Acryloylpiperidin-3-yl)methoxy)-6-aminopyrimidin-4-yl)-5-fluoro-2-methylphenyl)-4-cyclopropyl-2-fluorobenzamide; N-(3-(5-(((2R,3S)-1-Acryloyl-3-methoxypyrrolidin-2-yl)methoxy)-6-aminopyrimidin-4-yl)-5-fluoro-2-methylphenyl)-4-cyclopropyl-2-fluorobenzamide; N-(3-(5-(((2S,4R)-1-Acryloyl-4-cyanopyrrolidin-2-yl)methoxy)-6-aminopyrimidin-4-yl)-5-fluoro-2-methylphenyl)-4-cyclopropyl-2-fluorobenzamide; or N-(3-(5-(((2S,4S)-1-Acryloyl-4-cyanopyrrolidin-2-yl)methoxy)-6-aminopyrimidin-4-yl)-5-fluoro-2-methylphenyl)-4-cyclopropyl-2-fluorobenzamide.

[1077] Unless otherwise provided, the chemical terms used above in describing the BTK inhibitor of Formula I are used according to their meanings as set out in International Application WO/2015/079417, which is herein incorporated by reference in its entirety.

[1078] In one embodiment, the kinase inhibitor is an mTOR inhibitor selected from temsirolimus; ridaforolimus (1R,2R,4S)-4-[(2R)-2 [(1R,9S,12S,15R,16E,18R,19R,21R,23S,24E,26E,28Z,30S,32S,35R)-1,18-dihydroxy-19,30-dimethoxy-15,17,21,23,29,35-hexamethyl-2,3,10,14,20-pentaoxo-11,36-dioxa-4-azatricyclo[30.3.1.0^{4.9}] hexatriaconta-16,24,26,28-tetraen-12-yl]propyl]-2-methoxycyclohexyl dimethylphosphinate, also known as AP23573 and MK8669; everolimus (RAD001); rapamycin (AY22989); simapimod; (542,4-bi s[(3S)-3-methylmorpholin-4-yl]pyrido[2,3-d]pyrimidin-7-yl}-2-methoxyphenyl)methanol (AZD8055); 2-amino-8-[frans-4-(2-hydroxyethoxy)cyclohexyl]-6-(6-methoxy-3-pyridinyl)-4-methyl-pyrido[2,3-d]pyrimidin-7(8H)-one (PF04691502); and N²-[1,4-dioxo-4-[[4-(4-oxo-8-phenyl-4H-1-benzopyran-2-yl)morpholinium-4-yl]methoxy]butyl]-L-arginylglycyl-L-α-aspartylL-serine-, inner salt (SF1126) (SEQ ID NO: 1316); and XL765.

[1079] In one embodiment, the kinase inhibitor is an mTOR inhibitor, e.g., rapamycin, and the rapamycin is administered at a dose of about 3 mg, 4 mg, 5 mg, 6 mg, 7 mg, 8 mg, 9 mg, 10 mg (e.g., 6 mg) daily for a period of time, e.g., daily for 21 day cycle, or daily for 28 day cycle. In one embodiment, 1, 2, 3, 4, 5, 6, 7, 8, 9, 10, 11, 12 or more cycles of rapamycin are administered. In one embodiment, the kinase inhibitor is an mTOR inhibitor, e.g., everolimus and the everolimus is administered at a dose of about 2 mg, 2.5 mg, 3 mg, 4 mg, 5 mg, 6 mg, 7 mg, 8 mg, 9 mg, 10 mg, 11 mg, 12 mg, 13 mg, 14 mg, 15 mg (e.g., 10 mg) daily for a period of time, e.g., daily for 28 day cycle. In one embodiment, 1, 2, 3, 4, 5, 6, 7, 8, 9, 10, 11, 12 or more cycles of everolimus are administered.

[1080] In one embodiment, the kinase inhibitor is an MNK inhibitor selected from CGP052088; 4-amino-3-(p-fluorophenylamino)-pyrazolo[3,4-d]pyrimidine (CGP57380); cercosporamide; ETC-1780445-2; and 4-amino-5-(4-fluoroanilino)-pyrazolo[3,4-d]pyrimidine.

[1081] In embodiments, a CAR-expressing cell described herein is administered to a subject in combination with a phosphoinositide 3-kinase (PI3K) inhibitor (e.g., a PI3K inhibitor described herein, e.g., idelalisib or duvelisib) and/or rituximab. In embodiments, a CAR-expressing cell described herein is administered to a subject in combination with idelalisib and rituximab. In embodiments, a CAR-expressing cell described herein is administered to a subject in combination with duvelisib and rituximab. Idelalisib (also called GS-1101 or CAL-101; Gilead) is a small molecule that blocks the delta isoform of PI3K. The structure of idelalisib (5-Fluoro-3-phenyl-2-[(1S)-1-(7H-purin-6-ylamino)propyl]-4(3H)-quinazolinone) is shown below.

[chemical structure]

[1082] Duvelisib (also called IPI-145; Infinity Pharmaceuticals and Abbvie) is a small molecule that blocks PI3K-δ,γ. The structure of duvelisib (8-Chloro-2-phenyl-3-[(1S)-1-(9H-purin-6-ylamino)ethyl]-1(2H)-isoquinolinone) is shown below.

[chemical structure]

[1083] In embodiments, the subject has CLL. In embodiments, the subject has relapsed CLL, e.g., the subject has previously been administered a cancer therapy (e.g., previously been administered an anti-CD20 antibody or previously been administered ibrutinib). For example, the subject has a deletion in the short arm of chromosome 17 (del(17p), e.g., in a leukemic cell). In other examples, the subject does not have a del(17p). In embodiments, the subject comprises a leukemic cell comprising a mutation in the immunoglobulin heavy-chain variable-region (IgVH) gene. In other embodiments, the subject does not comprise a leukemic cell comprising a mutation in the immunoglobulin heavy-chain variable-region (IgVH) gene. In embodiments, the subject has a deletion in the long arm of chromosome 11 (del(11q)). In other embodiments, the subject does not have a del(11q). In embodiments, idelalisib is administered at a dosage of about 100-400 mg (e.g., 100-125, 125-150, 150-175, 175-200, 200-225, 225-250, 250-275, 275-300, 325-350, 350-375, or 375-400 mg), e.g., BID. In embodiments, duvelisib is administered at a dosage of about 15-100 mg (e.g., about 15-25, 25-50, 50-75, or 75-100 mg), e.g., twice a day. In embodiments, rituximab is administered at a dosage of about 350-550 mg/m² (e.g., 350-375, 375-400, 400-425, 425-450, 450-475, or 475-500 mg/m²), e.g., intravenously.

[1084] In one embodiment, the kinase inhibitor is a dual phosphatidylinositol 3-kinase (PI3K) and mTOR inhibitor selected from 2-Amino-8-[trans-4-(2-hydroxyethoxy)cyclohexyl]-6-(6-methoxy-3-pyridinyl)-4-methyl-pyrido[2,3-d]pyrimidin-7(8H)-one (PF-04691502); N-[4-[[4-(Dimethylamino)-1-piperidinyl]carbonyl]phenyl]-N-[4-(4,6-di-4-morpholinyl-1,3,5-triazin-2-yl)phenyl]urea (PF-05212384, PKI-587); 2-Methyl-2-{4-[3-methyl-2-oxo-8-(quinolin-3-yl)-2,3-dihydro-1H-imidazo[4,5-c]quinolin-1-yl]phenyl}propanenitrile (BEZ-235); apitolisib (GDC-0980, RG7422); 2,4-Difluoro-N-{2-(methyloxy)-5-[4-(4-pyridazinyl)-6-quinolinyl]-3-pyridinyl}benzenesulfonamide (GSK2126458); 8-(6-methoxypyridin-3-yl)-3-methyl-1-(4-(piperazin-1-yl)-3-(trifluoromethyl)phenyl)-1H-imidazo[4,5-c]quinolin-2(3H)-one Maleic acid (NVP-BGT226); 3-[4-(4-Morpholinylpyrido[3′,2′:4,5]furo[3,2-d]pyrimidin-2-yl]phenol 103); 5-(9-isopropyl-8-methyl-2-morpholino-9H-purin-6-yl)pyrimidin-2-amine (VS-5584, SB2343); and N-[2-[(3,5-Dimethoxyphenyl)amino]quinoxalin-3-yl]-4-[(4-methyl-3-methoxyphenyl)carbonyl]aminophenylsulfonamide (XL765).

[1085] In embodiments, a CAR-expressing cell described herein is administered to a subject in combination with an anaplastic lymphoma kinase (ALK) inhibitor. Exemplary ALK kinases include but are not limited to crizotinib (Pfizer), ceritinib (Novartis), alectinib (Chugai), brigatinib (also called AP26113; Ariad), entrectinib (Ignyta), PF-06463922 (Pfizer), TSR-011 (Tesaro) (see, e.g., Clinical Trial Identifier No. NCT02048488), CEP-37440 (Teva), and X-396 (Xcovery). In some embodiments, the subject has a solid cancer, e.g., a solid cancer described herein, e.g., lung cancer.

[1086] The chemical name of crizotinib is 3-[(1R)-1-(2,6-dichloro-3-fluorophenyl)ethoxy]-5-(1-piperidin-4-ylpyrazol-4-yl)pyridin-2-amine. The chemical name of ceritinib is 5-Chloro-N²-[2-isopropoxy-5-methyl-4-(4-piperidinyl)phenyl]-N⁴-[2-(isopropylsulfonyl)phenyl]-2,4-pyrimidinediamine. The chemical name of alectinib is 9-ethyl-6,6-dimethyl-8-(4-morpholinopiperidin-1-yl)-11-oxo-6,11-dihydro-5H-benzo[b]carbazole-3-carbonitrile. The chemical name of brigatinib is 5-Chloro-N²-{4-[4-(dimethylamino)-1-piperidinyl]-2-methoxyphenyl}-N⁴-[2-(dimethylphosphoryl)phenyl]-2,4-pyrimidinediamine. The chemical name of entrectinib is N-(5-(3,5-difluorobenzyl)-1H-indazol-3-yl)-4-(4-methylpiperazin-1-yl)-2-((tetrahydro-2H-pyran-4-yl)amino)benzamide. The chemical name of PF-06463922 is (10R)-7-Amino-12-fluoro-2,10,16-trimethyl-15-oxo-10,15,16,17-tetrahydro-2H-8,4-(metheno)pyrazolo[4,3-h][2,5,11]-benzoxadiazacyclotetradecine-3-carbonitrile. The chemical structure of CEP-37440 is (S)-2-((5-chloro-2-((6-(4-(2-hydroxyethyl)piperazin-1-yl)-1-methoxy-6,7,8,9-tetrahydro-5H-benzo[7]annulen-2-yl)amino)pyrimidin-4-yl)amino)-N-methylbenzamide. The chemical name of X-396 is (R)-6-amino-5-(1-(2,6-dichloro-3-fluorophenyl)ethoxy)-N-(4-(4-methylpiperazine-1-carbonyl)phenyl)pyridazine-3-carboxamide.

[1087] In one embodiment, the kinase inhibitor is an ITK inhibitor selected from ibrutinib; N-(5-(5-(4-Acetylpiperazine-1-carbonyl)-4-methoxy-2-methylphenylthio)thiazol-2-yl)-4-((3,3-dimethylbutan-2-ylamino)methyl)benzamide (BMS-509744); 7-benzyl-1-(3-(piperidin-1-yl)propyl)-2-(4-(pyridin-4-yl)phenyl)-1H-imidazo[4,5-g] quinoxalin-6(5H)-one (CTA056); R)-3-(1-(1-Acryloylpiperidin-3-yl)-4-amino-1H-pyrazolo[3,4-d]pyrimidin-3-yl)-N-(3-methyl-4-(1-methylethyl))benzamide (PF-06465469).

[1088] Drugs that inhibit either the calcium dependent phosphatase calcineurin (cyclosporine and FK506) or inhibit the p70S6 kinase that is important for growth factor induced signaling (rapamycin). (Liu et al., Cell 66:807-815, 1991; Henderson et al., Immun. 73:316-321, 1991; Bierer et al., Curr. Opin. Immun. 5:763-773, 1993) can also be used. In a further aspect, the cell compositions of the present invention may be administered to a patient in conjunction with (e.g., before, simultaneously or following) bone marrow transplantation, T cell ablative therapy using chemotherapy agents such as, fludarabine, external-beam radiation therapy (XRT), cyclophosphamide, and/or antibodies such as OKT3 or CAMPATH. In one aspect, the cell compositions of the present invention are administered following B-cell ablative therapy such as agents that react with CD20, e.g., Rituxan. For example, in one embodiment, subjects may undergo standard treatment with high dose chemotherapy followed by peripheral blood stem cell transplantation. In certain embodiments, following the transplant, subjects receive an infusion of the expanded immune cells of the present invention. In an additional embodiment, expanded cells are administered before or following surgery.

[1089] In embodiments, a CAR-expressing cell described herein is administered to a subject in combination with an indoleamine 2,3-dioxygenase (IDO) inhibitor. IDO is an enzyme that catalyzes the degradation of the amino acid, L-tryptophan, to kynurenine. Many cancers overexpress IDO, e.g., prostatic, colorectal, pancreatic, cervical, gastric, ovarian, head, and lung cancer. pDCs, macrophages, and dendritic cells (DCs) can express IDO. Without being bound by theory, it is thought that a decrease in L-tryptophan (e.g., catalyzed by IDO) results in an immunosuppressive milieu by inducing T-cell anergy and apoptosis. Thus, without being bound by theory, it is thought that an IDO inhibitor can enhance the efficacy of a CAR-expressing cell described herein, e.g., by decreasing the suppression or death of a CAR-expressing immune cell. In embodiments, the subject has a solid tumor, e.g., a solid tumor described herein, e.g., prostatic, colorectal, pancreatic, cervical, gastric, ovarian, head, or lung cancer. Exemplary inhibitors of IDO include but are not limited to 1-methyl-tryptophan, indoximod (NewLink Genetics) (see, e.g., Clinical Trial Identifier Nos. NCT01191216; NCT01792050), and INCB024360 (Incyte Corp.) (see, e.g., Clinical Trial Identifier Nos. NCT01604889; NCT01685255)

[1090] In embodiments, a CAR-expressing cell described herein is administered to a subject in combination with a modulator of myeloid-derived suppressor cells (MDSCs). MDSCs accumulate in the periphery and at the tumor site of many solid tumors. These cells suppress T cell responses, thereby hindering the efficacy of CAR-expressing cell therapy. Without being bound by theory, it is thought that administration of a MDSC modulator enhances the efficacy of a CAR-expressing cell described herein. In an embodiment, the subject has a solid tumor, e.g., a solid tumor described herein, e.g., glioblastoma. Exemplary modulators of MDSCs include but are not limited to MCS110 and BLZ945. MCS110 is a monoclonal antibody (mAb) against macrophage colony-stimulating factor (M-CSF). See, e.g., Clinical Trial Identifier No. NCT00757757. BLZ945 is a small molecule inhibitor of colony stimulating factor 1 receptor (CSF1R). See, e.g., Pyonteck et al. Nat. Med. 19(2013):1264-72. The structure of BLZ945 is shown below.

[chemical structure]

[1091] In embodiments, a CAR-expressing cell described herein is administered to a subject in combination with a CD19 CART cell (e.g., CTL019, e.g., as described in WO2012/079000, incorporated herein by reference). In embodiments, the subject has acute myeloid leukemia (AML), e.g., a CD19 positive AML or a CD19 negative AML. In embodiments, the subject has a CD19+ lymphoma, e.g., a CD19+ Non-Hodgkin's Lymphoma (NHL), a CD19+ FL, or a CD19+ DLBCL. In embodiments, the subject has a relapsed or refractory CD19+ lymphoma. In embodiments, a lymphodepleting chemotherapy is administered to the subject prior to, concurrently with, or after administration (e.g., infusion) of CD19 CART cells. In an example, the lymphodepleting chemotherapy is administered to the subject prior to administration of CD19 CART cells. For example, the lymphodepleting chemotherapy ends 1-4 days (e.g., 1, 2, 3, or 4 days) prior to CD19 CART cell infusion. In embodiments, multiple doses of CD19 CART cells are administered, e.g., as described herein. For example, a single dose comprises about 5×10⁸ CD19 CART cells. In embodiments, a lymphodepleting chemotherapy is administered to the subject prior to, concurrently with, or after administration (e.g., infusion) of a CAR-expressing cell described herein, e.g., a non-CD19 CAR-expressing cell. In embodiments, a CD19 CART is administered to the subject prior to, concurrently with, or after administration (e.g., infusion) of a non-CD19 CAR-expressing cell, e.g., a non-CD19 CAR-expressing cell described herein.

[1092] In some embodiments, a CAR-expressing cell described herein is administered to a subject in combination with a CD19 CAR-expressing cell, e.g., CTL019, e.g., as described in WO2012/079000, incorporated herein by reference, for treatment of a disease associated with the expression of CLL-1, e.g., a cancer described herein. Without being bound by theory, it is believed that administering a CD19 CAR-expressing cell in combination with a CAR-expressing cell improves the efficacy of a CAR-expressing cell described herein by targeting early lineage cancer cells, e.g., cancer stem cells, modulating the immune response, depleting regulatory B cells, and/or improving the tumor microenvironment. For example, a CD19 CAR-expressing cell targets cancer cells that express early lineage markers, e.g., cancer stem cells and CD19-expressing cells, while the CAR-expressing cell described herein targets cancer cells that express later lineage markers, e.g., CLL-1. This preconditioning approach can improve the efficacy of the CAR-expressing cell described herein. In such embodiments, the CD19 CAR-expressing cell is administered prior to, concurrently with, or after administration (e.g., infusion) of a CAR-expressing cell described herein.

[1093] In embodiments, a CAR-expressing cell described herein also expresses a CAR targeting CD19, e.g., a CD19 CAR. In an embodiment, the cell expressing a CAR described herein and a CD19 CAR is administered to a subject for treatment of a cancer described herein, e.g., AML. In an embodiment, the configurations of one or both of the CAR molecules comprise a primary intracellular signaling domain and a costimulatory signaling domain. In another embodiment, the configurations of one or both of the CAR molecules comprise a primary intracellular signaling domain and two or more, e.g., 2, 3, 4, or 5 or more, costimulatory signaling domains. In such embodiments, the CAR molecule described herein and the CD19 CAR may have the same or a different primary intracellular signaling domain, the same or different costimulatory signaling domains, or the same number or a different number of costimulatory signaling domains. Alternatively, the CAR described herein and the CD19 CAR are configured as a split CAR, in which one of the CAR molecules comprises an antigen binding domain and a costimulatory domain (e.g., 4-1BB), while the other CAR molecule comprises an antigen binding domain and a primary intracellular signaling domain (e.g., CD3 zeta).

[1094] In some embodiments, a CAR-expressing cell described herein is administered to a subject in combination with a interleukin-15 (IL-15) polypeptide, a interleukin-15 receptor alpha (IL-15Ra) polypeptide, or a combination of both a IL-15 polypeptide and a IL-15Ra polypeptide e.g., hetIL-15 (Admune Therapeutics, LLC). hetIL-15 is a heterodimeric non-covalent complex of IL-15 and IL-15Ra. hetIL-15 is described in, e.g., U.S. Pat. No. 8,124,084, U.S. 2012/0177598, U.S. 2009/0082299, U.S. 2012/0141413, and U.S. 2011/0081311, incorporated herein by reference. In embodiments, het-IL-15 is administered subcutaneously. In embodiments, the subject has a cancer, e.g., solid cancer, e.g., melanoma or colon cancer. In embodiments, the subject has a metastatic cancer.

[1095] In embodiments, a subject having a disease described herein, e.g., a hematological disorder, e.g., AML or MDS, is administered a CAR-expressing cell described herein in combination with an agent, e.g., cytotoxic or chemotherapy agent, a biologic therapy (e.g., antibody, e.g., monoclonal antibody, or cellular therapy), or an inhibitor (e.g., kinase inhibitor). In embodiments, the subject is administered a CAR-expressing cell described herein in combination with a cytotoxic agent, e.g., CPX-351 (Celator Pharmaceuticals), cytarabine, daunorubicin, vosaroxin (Sunesis Pharmaceuticals), sapacitabine (Cyclacel Pharmaceuticals), idarubicin, or mitoxantrone. CPX-351 is a liposomal formulation comprising cytarabine and daunorubicin at a 5:1 molar ratio. In embodiments, the subject is administered a CAR-expressing cell described herein in combination with a hypomethylating agent, e.g., a DNA methyltransferase inhibitor, e.g., azacitidine or decitabine. In embodiments, the subject is administered a CAR-expressing cell described herein in combination with a biologic therapy, e.g., an antibody or cellular therapy, e.g., 225Ac-lintuzumab (Actimab-A; Actinium Pharmaceuticals), IPH2102 (Innate Pharma/Bristol Myers Squibb), SGN-CD33A (Seattle Genetics), or gemtuzumab ozogamicin (Mylotarg; Pfizer). SGN-CD33A is an antibody-drug conjugate (ADC) comprising a pyrrolobenzodiazepine dimer that is attached to an anti-CD33 antibody. Actimab-A is an anti-CD33 antibody (lintuzumab) labeled with actinium. IPH2102 is a monoclonal antibody that targets killer immunoglobulin-like receptors (KIRs). In embodiments, the subject is administered a CAR-expressing cell described herein in combination a FLT3 inhibitor, e.g., sorafenib (Bayer), midostaurin (Novartis), quizartinib (Daiichi Sankyo), crenolanib (Arog Pharmaceuticals), PLX3397 (Daiichi Sankyo), AKN-028 (Akinion Pharmaceuticals), or ASP2215 (Astellas). In embodiments, the subject is administered a CAR-expressing cell described herein in combination with an isocitrate dehydrogenase (IDH) inhibitor, e.g., AG-221 (Celgene/Agios) or AG-120 (Agios/Celgene). In embodiments, the subject is administered a CAR-expressing cell described herein in combination with a cell cycle regulator, e.g., inhibitor of polo-like kinase 1 (Plk1), e.g., volasertib (Boehringer Ingelheim); or an inhibitor of cyclin-dependent kinase 9 (Cdk9), e.g., alvocidib (Tolero Pharmaceuticals/Sanofi Aventis). In embodiments, the subject is administered a CAR-expressing cell described herein in combination with a B cell receptor signaling network inhibitor, e.g., an inhibitor of B-cell lymphoma 2 (Bcl-2), e.g., venetoclax (Abbvie/Roche); or an inhibitor of Bruton's tyrosine kinase (Btk), e.g., ibrutinib (Pharmacyclics/Johnson & Johnson Janssen Pharmaceutical). In embodiments, the subject is administered a CAR-expressing cell described herein in combination with an inhibitor of M1 aminopeptidase, e.g., tosedostat (CTI BioPharma/Vernalis); an inhibitor of histone deacetylase (HDAC), e.g., pracinostat (MEI Pharma); a multi-kinase inhibitor, e.g., rigosertib (Onconova Therapeutics/Baxter/SymBio); or a peptidic CXCR4 inverse agonist, e.g., BL-8040 (BioLineRx).

[1096] In another embodiment, the subjects receive an infusion of the CAR expressing cell, e.g., CD19 CAR-expressing cell, compositions of the present invention prior to transplantation, e.g., allogeneic stem cell transplant, of cells. In a preferred embodiment, CAR expressing cells transiently express the CAR, e.g., by electroporation of an mRNA CAR, whereby the expression of the antigen targeted by the CAR, e.g., CD19 is terminated prior to infusion of donor stem cells to avoid engraftment failure. In one embodiment, the subject can be administered an agent which reduces or ameliorates a side effect associated with the administration of a CAR-expressing cell. Side effects associated with the administration of a CAR-expressing cell include, but are not limited to CRS, and hemophagocytic lymphohistiocytosis (HLH), also termed Macrophage Activation Syndrome (MAS). Symptoms of CRS include high fevers, nausea, transient hypotension, hypoxia, and the like. Accordingly, the methods described herein can comprise administering a CAR-expressing cell described herein to a subject and further administering an agent to manage elevated levels of a soluble factor resulting from treatment with a CAR-expressing cell. In one embodiment, the soluble factor elevated in the subject is one or more of IFN-γ, TNFα, IL-2 and IL-6. Therefore, an agent administered to treat this side effect can be an agent that neutralizes one or more of these soluble factors. Examples of such agents include, but are not limited to a steroid (e.g., corticosteroid), an inhibitor of TNFα, and an inhibitor of IL-6. An example of a TNFα inhibitor is an anti-TNFα antibody molecule such as, infliximab, adalimumab, certolizumab pegol, and golimumab. Another example of a TNFα inhibitor is a fusion protein such as entanercept. Small molecule inhibitor of TNFα include, but are not limited to, xanthine derivatives (e.g. pentoxifylline) and bupropion. An example of an IL-6 inhibitor is an anti-IL-6 antibody molecule such as tocilizumab (toc), sarilumab, elsilimomab, CNTO 328, ALD518/BMS-945429, CNTO 136, CPSI-2364, CDP6038, VX30, ARGX-109, FE301, and FM101. In one embodiment, the anti-IL-6 antibody molecule is tocilizumab. An example of an IL-1R based inhibitor is anakinra.

[1097] In embodiments, lymphodepletion is performed on a subject, e.g., prior to administering one or more cells that express a CAR described herein. In embodiments, the lymphodepletion comprises administering one or more of melphalan, cytoxan, cyclophosphamide, and fludarabine.

[1098] In embodiments, a lymphodepleting chemotherapy is administered to the subject prior to, concurrently with, or after administration (e.g., infusion) of CAR cells, e.g., cells described herein. In an example, the lymphodepleting chemotherapy is administered to the subject prior to administration of CAR cells. For example, the lymphodepleting chemotherapy ends 1-4 days (e.g., 1, 2, 3, or 4 days) prior to CAR cell infusion. In embodiments, multiple doses of CAR cells are administered, e.g., as described herein. For example, a single dose comprises about 5×10⁸ CAR cells. In embodiments, a lymphodepleting chemotherapy is administered to the subject prior to, concurrently with, or after administration (e.g., infusion) of a CAR-expressing cell described herein.

[1099] In some embodiments, CAR-expressing cells described herein are administered to a subject in combination with a CD19 CAR-expressing cell, e.g., CTL019, e.g., as described in WO2012/079000, incorporated herein by reference, for treatment of a disease associated with the expression of cancer antigen, e.g., a cancer described herein. Without being bound by theory, it is believed that administering a CD19 CAR-expressing cell in combination with another CAR-expressing cell improves the efficacy of a CAR-expressing cell described herein by targeting early lineage cancer cells, e.g., cancer stem cells, modulating the immune response, depleting regulatory B cells, and/or improving the tumor microenvironment. For example, a CD19 CAR-expressing cell targets cancer cells that express early lineage markers, e.g., cancer stem cells and CD19-expressing cells, while some other CAR-expressing cells described herein target cancer cells that express later lineage markers. This preconditioning approach can improve the efficacy of the CAR-expressing cell described herein. In such embodiments, the CD19 CAR-expressing cell is administered prior to, concurrently with, or after administration (e.g., infusion) of the second CAR-expressing cell.

[1100] In embodiments, a CAR-expressing cell which expresses a CAR targeting a cancer antigen other than CD19 also expresses a CAR targeting CD19, e.g., a CD19 CAR. In an embodiment, the cell expressing a non-CD19 CAR and a CD19 CAR is administered to a subject for treatment of a cancer described herein, e.g., AML. In an embodiment, the configurations of one or both of the CAR molecules comprise a primary intracellular signaling domain and a costimulatory signaling domain. In another embodiment, the configurations of one or both of the CAR molecules comprise a primary intracellular signaling domain and two or more, e.g., 2, 3, 4, or 5 or more, costimulatory signaling domains. In such embodiments, the non-CD19 CAR molecule and the CD19 CAR may have the same or a different primary intracellular signaling domain, the same or different costimulatory signaling domains, or the same number or a different number of costimulatory signaling domains. Alternatively, the non-CD19 CAR and the CD19 CAR are configured as a split CAR, in which one of the CAR molecules comprises an antigen binding domain and a costimulatory domain (e.g., 4-1BB), while the other CAR molecule comprises an antigen binding domain and a primary intracellular signaling domain (e.g., CD3 zeta).

### Inhibitory Molecule Inhibitors/Checkpoint Inhibitors

[1101] In one embodiment, the subject can be administered an agent which enhances the activity of a CAR-expressing cell. For example, in one embodiment, the agent can be an agent which inhibits an inhibitory molecule, e.g., the agent is a checkpoint inhibitor. Inhibitory or checkpoint molecules, e.g., Programmed Death 1 (PD1), can, in some embodiments, decrease the ability of a CAR-expressing cell to mount an immune effector response. Examples of inhibitory molecules include PD1, PD-L1, PD-L2, CTLA4, TIM3, CEACAM (e.g., CEACAM-1, CEACAM-3 and/or CEACAM-5), LAG3, VISTA, BTLA, TIGIT, LAIR1, CD160, 2B4, CD160, 2B4, CD80, CD86, B7-H3 (CD276), B7-H4 (VTCN1), HVEM (TNFRSF14 or CD270), KIR, A2aR, MHC class I, MHC class II, GALS, adenosine, and TGFR (e.g., TGFR beta). In embodiments, the CAR-expressing cell described herein comprises a switch costimulatory receptor, e.g., as described in WO 2013/019615, which is incorporated herein by reference in its entirety.

[1102] The methods described herein can include administration of a CAR-expressing cell in combination with a checkpoint inhibitor. In one embodiment, the subject is a complete responder. In another embodiment, the subject is a partial responder or non-responder, and, e.g., in some embodiments, the checkpoint inhibitor is administered prior to the CAR-expressing cell, e.g., two weeks, 12 days, 10 days, 8 days, one week, 6 days, 5 days, 4 days, 3 days, 2 days or 1 day before administration of the CAR-expressing cell. In some embodiments, the checkpoint inhibitor is administered concurrently with the CAR-expressing cell.

[1103] Inhibition of an inhibitory molecule, e.g., by inhibition at the DNA, RNA or protein level, can optimize a CAR-expressing cell performance. In embodiments, an inhibitory nucleic acid, e.g., an inhibitory nucleic acid, e.g., a dsRNA, e.g., an siRNA or shRNA, or a clustered regularly interspaced short palindromic repeats (CRISPR), a transcription-activator like effector nuclease (TALEN), or a zinc finger endonuclease (ZFN), can be used to inhibit expression of an inhibitory molecule in the CAR-expressing cell. In an embodiment the inhibitor is an shRNA. In an embodiment, the inhibitory molecule is inhibited within a CAR-expressing cell. In these embodiments, a dsRNA molecule that inhibits expression of the inhibitory molecule is linked to the nucleic acid that encodes a component, e.g., all of the components, of the CAR.

[1104] In an embodiment, a nucleic acid molecule that encodes a dsRNA molecule that inhibits expression of the molecule that modulates or regulates, e.g., inhibits, T-cell function is operably linked to a promoter, e.g., a H1- or a U6-derived promoter such that the dsRNA molecule that inhibits expression of the molecule that modulates or regulates, e.g., inhibits, T-cell function is expressed, e.g., is expressed within a CAR-expressing cell. See e.g., Tiscornia G., “Development of Lentiviral Vectors Expressing siRNA,” Chapter 3, in Gene Transfer: Delivery and Expression of DNA and RNA (eds. Friedmann and Rossi). Cold Spring Harbor Laboratory Press, Cold Spring Harbor, NY, USA, 2007; Brummelkamp T R, et al. (2002) Science 296: 550-553; Miyagishi M, et al. (2002) Nat. Biotechnol. 19: 497-500. In an embodiment the nucleic acid molecule that encodes a dsRNA molecule that inhibits expression of the molecule that modulates or regulates, e.g., inhibits, T-cell function is present on the same vector, e.g., a lentiviral vector, that comprises a nucleic acid molecule that encodes a component, e.g., all of the components, of the CAR. In such an embodiment, the nucleic acid molecule that encodes a dsRNA molecule that inhibits expression of the molecule that modulates or regulates, e.g., inhibits, T-cell function is located on the vector, e.g., the lentiviral vector, 5′- or 3′- to the nucleic acid that encodes a component, e.g., all of the components, of the CAR. The nucleic acid molecule that encodes a dsRNA molecule that inhibits expression of the molecule that modulates or regulates, e.g., inhibits, T-cell function can be transcribed in the same or different direction as the nucleic acid that encodes a component, e.g., all of the components, of the CAR. In an embodiment the nucleic acid molecule that encodes a dsRNA molecule that inhibits expression of the molecule that modulates or regulates, e.g., inhibits, T-cell function is present on a vector other than the vector that comprises a nucleic acid molecule that encodes a component, e.g., all of the components, of the CAR. In an embodiment, the nucleic acid molecule that encodes a dsRNA molecule that inhibits expression of the molecule that modulates or regulates, e.g., inhibits, T-cell function it transiently expressed within a CAR-expressing cell. In an embodiment, the nucleic acid molecule that encodes a dsRNA molecule that inhibits expression of the molecule that modulates or regulates, e.g., inhibits, T-cell function is stably integrated into the genome of a CAR-expressing cell. In an embodiment, the molecule that modulates or regulates, e.g., inhibits, T-cell function is PD-1.

[1105] In one embodiment, the inhibitor of an inhibitory signal can be, e.g., an antibody or antibody fragment that binds to an inhibitory molecule. For example, the agent can be an antibody or antibody fragment that binds to PD1, PD-L1, PD-L2 or CTLA4 (e.g., ipilimumab (also referred to as MDX-010 and MDX-101, and marketed as Yervoy®; Bristol-Myers Squibb; Tremelimumab (IgG2 monoclonal antibody available from Pfizer, formerly known as ticilimumab, CP-675,206)). In an embodiment, the agent is an antibody or antibody fragment that binds to TIM3. In an embodiment, the agent is an antibody or antibody fragment that binds to LAG3. In an embodiment, the agent is an antibody or antibody fragment that binds to CEACAM (e.g., CEACAM-1, CEACAM-3 and/or CEACAM-5). In embodiments, the agent that enhances the activity of a CAR-expressing cell, e.g., inhibitor of an inhibitory molecule, is administered in combination with an allogeneic CAR, e.g., an allogeneic CAR described herein (e.g., described in the Allogeneic CAR section herein).

[1106] PD1 is an inhibitory member of the CD28 family of receptors that also includes CD28, CTLA-4, ICOS, and BTLA. PD1 is expressed on activated B cells, T cells and myeloid cells (Agata et al. 1996 Int. Immunol 8:765-75). Two ligands for PD1, PD-L1 and PD-L2 have been shown to downregulate T cell activation upon binding to PD1 (Freeman et a. 2000 J Exp Med 192:1027-34; Latchman et al. 2001 Nat Immunol 2:261-8; Carter et al. 2002 Eur J Immunol 32:634-43). PD-L1 is abundant in human cancers (Dong et al. 2003 J Mol Med 81:281-7; Blank et al. 2005 Cancer Immunol. Immunother 54:307-314; Konishi et al. 2004 Clin Cancer Res 10:5094). Immune suppression can be reversed by inhibiting the local interaction of PD1 with PD-L1.

[1107] Antibodies, antibody fragments, and other inhibitors of PD1, PD-L1 and PD-L2 are available in the art and may be used combination with a CD19 CAR described herein. For example, nivolumab (also referred to as BMS-936558 or MDX1106; Bristol-Myers Squibb) is a fully human IgG4 monoclonal antibody which specifically blocks PD1. Nivolumab (clone 5C4) and other human monoclonal antibodies that specifically bind to PD1 are disclosed in U.S. Pat. No. 8,008,449 and WO2006/121168. Pidilizumab (CT-011; Cure Tech) is a humanized IgG1k monoclonal antibody that binds to PD1. Pidilizumab and other humanized anti-PD1 monoclonal antibodies are disclosed in WO2009/101611. Pembrolizumab (formerly known as lambrolizumab, and also referred to as Keytruda, MK03475; Merck) is a humanized IgG4 monoclonal antibody that binds to PD1. Pembrolizumab and other humanized anti-PD1 antibodies are disclosed in U.S. Pat. No. 8,354,509 and WO2009/114335. MEDI4736 (Medimmune) is a human monoclonal antibody that binds to PDL1, and inhibits interaction of the ligand with PD1. MDPL3280A (Genentech/Roche) is a human Fc optimized IgG1 monoclonal antibody that binds to PD-L1. MDPL3280A and other human monoclonal antibodies to PD-L1 are disclosed in U.S. Pat. No. 7,943,743 and U.S Publication No.: 20120039906. Other anti-PD-L1 binding agents include YW243.55.S70 (heavy and light chain variable regions are shown in SEQ ID NOs 20 and 21 in WO2010/077634) and MDX-1 105 (also referred to as BMS-936559, and, e.g., anti-PD-L1 binding agents disclosed in WO2007/005874). AMP-224 (B7-DCIg; Amplimmune; e.g., disclosed in WO2010/027827 and WO2011/066342), is a PD-L2 Fc fusion soluble receptor that blocks the interaction between PD1 and B7-H1. Other anti-PD1 antibodies include AMP 514 (Amplimmune), among others, e.g., anti-PD1 antibodies disclosed in U.S. Pat. No. 8,609,089, US 2010028330, and/or US 20120114649.

[1108] In some embodiments, a PD1 inhibitor described herein (e.g., a PD1 antibody, e.g., a PD1 antibody described herein) is used combination with a CD19 CAR described herein to treat a disease associated with expression of CD19. In some embodiments, a PD-L1 inhibitor described herein (e.g., a PD-L1 antibody, e.g., a PD-L1 antibody described herein) is used combination with a CD19 CAR described herein to treat a disease associated with expression of CD19. The disease may be, e.g., a lymphoma such as DLBCL including primary DLBCL or secondary DLBCL. In some embodiments, the subject has, or is identified as having, at least 5%, 6%, 7%, 8%, 9%, 10%, 20%, 30%, 40%, 50%, 60%, 70%, 80%, or 90% of cancer cells, e.g., DLBCL cells, which are CD3+/PD1+. In some embodiments, the subject has, or is identified as having, substantially non-overlapping populations of CD19+ cells and PD-L1+ cells in a cancer, e.g., the cancer microenvironment. For instance, in some embodiments, less than 20%, 10%, 9%, 8%, 7%, 6%, 5%, 4%, 3%, 2%, or 1% of cells in the cancer, e.g., cancer microenvironment, are double positive for CD19 and PD-L1.

[1109] In some embodiments, the subject is treated with a combination of a CD19 CAR, a PD1 inhibitor, and a PD-L1 inhibitor. In some embodiments, the subject is treated with a combination of a CD19 CAR, a PD1 inhibitor, and a CD3 inhibitor. In some embodiments, the subject is treated with a combination of a CD19 CAR, a PD1 inhibitor, a PD-L1 inhibitor, and a CD3 inhibitor.

[1110] In some embodiments, the methods herein include a step of assaying cells in a biological sample, e.g., a sample comprising DLBCL cells, for CD3 and/or PD-1 (e.g., CD3 and/or PD-1 expression). In some embodiments, the methods include a step of assaying cells in a biological sample, e.g., a sample comprising DLBCL cells, for CD19 and/or PD-L1 (e.g., CD19 and/or PD-L1 expression). In some embodiments, the methods include, e.g., providing a sample comprising cancer cells and performing a detection step, e.g., by immunohistochemistry, for one or more of CD3, PD-1, CD19, or PD-L1. The methods may comprise a further step of recommending or administering a treatment, e.g., a treatment comprising a CD19 CAR.

[1111] In one embodiment, the anti-PD-1 antibody or fragment thereof is an anti-PD-1 antibody molecule as described in US 2015/0210769, entitled “Antibody Molecules to PD-1 and Uses Thereof,” incorporated by reference in its entirety. In one embodiment, the anti-PD-1 antibody molecule includes at least one, two, three, four, five or six CDRs (or collectively all of the CDRs) from a heavy and light chain variable region from an antibody chosen from any of BAP049-hum01, BAP049-hum02, BAP049-hum03, BAP049-hum04, BAP049-hum05, BAP049-hum06, BAP049-hum07, BAP049-hum08, BAP049-hum09, BAP049-hum10, BAP049-hum11, BAP049-hum12, BAP049-hum13, BAP049-hum14, BAP049-hum15, BAP049-hum16, BAP049-Clone-A, BAP049-Clone-B, BAP049-Clone-C, BAP049-Clone-D, or BAP049-Clone-E; or as described in Table 1 of US 2015/0210769, or encoded by the nucleotide sequence in Table 1, or a sequence substantially identical (e.g., at least 80%, 85%, 90%, 92%, 95%, 97%, 98%, 99% or higher identical) to any of the aforesaid sequences; or closely related CDRs, e.g., CDRs which are identical or which have at least one amino acid alteration, but not more than two, three or four alterations (e.g., substitutions, deletions, or insertions, e.g., conservative substitutions).

[1112] In yet another embodiment, the anti-PD-1 antibody molecule comprises at least one, two, three or four variable regions from an antibody described herein, e.g., an antibody chosen from any of BAP049-hum01, BAP049-hum02, BAP049-hum03, BAP049-hum04, BAP049-hum05, BAP049-hum06, BAP049-hum07, BAP049-hum08, BAP049-hum09, BAP049-hum10, BAP049-hum11, BAP049-hum12, BAP049-hum13, BAP049-hum14, BAP049-hum15, BAP049-hum16, BAP049-Clone-A, BAP049-Clone-B, BAP049-Clone-C, BAP049-Clone-D, or BAP049-Clone-E; or as described in Table 1 of US 2015/0210769, or encoded by the nucleotide sequence in Table 1; or a sequence substantially identical (e.g., at least 80%, 85%, 90%, 92%, 95%, 97%, 98%, 99% or higher identical) to any of the aforesaid sequences.

[1113] TIM3 (T cell immunoglobulin-3) also negatively regulates T cell function, particularly in IFN-g-secreting CD4+ T helper 1 and CD8+ T cytotoxic 1 cells, and plays a critical role in T cell exhaustion. Inhibition of the interaction between TIM3 and its ligands, e.g., galectin-9 (Ga19), phosphatidylserine (PS), and HMGB1, can increase immune response. Antibodies, antibody fragments, and other inhibitors of TIM3 and its ligands are available in the art and may be used combination with a CD19 CAR described herein. For example, antibodies, antibody fragments, small molecules, or peptide inhibitors that target TIM3 binds to the IgV domain of TIM3 to inhibit interaction with its ligands. Antibodies and peptides that inhibit TIM3 are disclosed in WO2013/006490 and US20100247521. Other anti-TIM3 antibodies include humanized versions of RMT3-23 (disclosed in Ngiow et al., 2011, Cancer Res, 71:3540-3551), and clone 8B.2C12 (disclosed in Monney et al., 2002, Nature, 415:536-541). Bi-specific antibodies that inhibit TIM3 and PD-1 are disclosed in US20130156774.

[1114] In one embodiment, the anti-TIM3 antibody or fragment thereof is an anti-TIM3 antibody molecule as described in US 2015/0218274, entitled “Antibody Molecules to TIM3 and Uses Thereof,” incorporated by reference in its entirety. In one embodiment, the anti-TIM3 antibody molecule includes at least one, two, three, four, five or six CDRs (or collectively all of the CDRs) from a heavy and light chain variable region from an antibody chosen from any of ABTIM3, ABTIM3-hum01, ABTIM3-hum02, ABTIM3-hum03, ABTIM3-hum04, ABTIM3-hum05, ABTIM3-hum06, ABTIM3-hum07, ABTIM3-hum08, ABTIM3-hum09, ABTIM3-hum10, ABTIM3-hum11, ABTIM3-hum12, ABTIM3-hum13, ABTIM3-hum14, ABTIM3-hum15, ABTIM3-hum16, ABTIM3-hum17, ABTIM3-hum18, ABTIM3-hum19, ABTIM3-hum20, ABTIM3-hum21, ABTIM3-hum22, ABTIM3-hum23; or as described in Tables 1-4 of US 2015/0218274; or encoded by the nucleotide sequence in Tables 1-4; or a sequence substantially identical (e.g., at least 80%, 85%, 90%, 92%, 95%, 97%, 98%, 99% or higher identical) to any of the aforesaid sequences, or closely related CDRs, e.g., CDRs which are identical or which have at least one amino acid alteration, but not more than two, three or four alterations (e.g., substitutions, deletions, or insertions, e.g., conservative substitutions).

[1115] In yet another embodiment, the anti-TIM3 antibody molecule comprises at least one, two, three or four variable regions from an antibody described herein, e.g., an antibody chosen from any of ABTIM3, ABTIM3-hum01, ABTIM3-hum02, ABTIM3-hum03, ABTIM3-hum04, ABTIM3-hum05, ABTIM3-hum06, ABTIM3-hum07, ABTIM3-hum08, ABTIM3-hum09, ABTIM3-hum10, ABTIM3-hum11, ABTIM3-hum12, ABTIM3-hum13, ABTIM3-hum14, ABTIM3-hum15, ABTIM3-hum16, ABTIM3-hum17, ABTIM3-hum18, ABTIM3-hum19, ABTIM3-hum20, ABTIM3-hum21, ABTIM3-hum22, ABTIM3-hum23; or as described in Tables 1-4 of US 2015/0218274; or encoded by the nucleotide sequence in Tables 1-4; or a sequence substantially identical (e.g., at least 80%, 85%, 90%, 92%, 95%, 97%, 98%, 99% or higher identical) to any of the aforesaid sequences.

[1116] In other embodiments, the agent which enhances the activity of a CAR-expressing cell is a CEACAM inhibitor (e.g., CEACAM-1, CEACAM-3, and/or CEACAM-5 inhibitor). In one embodiment, the inhibitor of CEACAM is an anti-CEACAM antibody molecule. Exemplary anti-CEACAM-1 antibodies are described in WO 2010/125571, WO 2013/082366 WO 2014/059251 and WO 2014/022332, e.g., a monoclonal antibody 34B1, 26H7, and 5F4; or a recombinant form thereof, as described in, e.g., US 2004/0047858, U.S. Pat. No. 7,132,255 and WO 99/052552. In other embodiments, the anti-CEACAM antibody binds to CEACAM-5 as described in, e.g., Zheng et al. PLoS One. 2010 Sep. 2; 5(9). pii: e12529 (DOI:10:1371/journal.pone.0021146), or crossreacts with CEACAM-1 and CEACAM-5 as described in, e.g., WO 2013/054331 and US 2014/0271618.

[1117] Without wishing to be bound by theory, carcinoembryonic antigen cell adhesion molecules (CEACAM), such as CEACAM-1 and CEACAM-5, are believed to mediate, at least in part, inhibition of an anti-tumor immune response (see e.g., Markel et al. J Immunol. 2002 Mar. 15; 168(6):2803-10; Markel et al. J Immunol. 2006 Nov. 1; 177(9):6062-71; Markel et al. Immunology. 2009 February; 126(2):186-200; Markel et al. Cancer Immunol Immunother. 2010 February; 59(2):215-30; Ortenberg et al. Mol Cancer Ther. 2012 June; 11(6):1300-10; Stern et al. J Immunol. 2005 Jun. 1; 174(11):6692-701; Zheng et al. PLoS One. 2010 Sep. 2; 5(9). pii: e12529). For example, CEACAM-1 has been described as a heterophilic ligand for TIM-3 and as playing a role in TIM-3-mediated T cell tolerance and exhaustion (see e.g., WO 2014/022332; Huang, et al. (2014) Nature doi:10.1038/nature13848). In embodiments, co-blockade of CEACAM-1 and TIM-3 has been shown to enhance an anti-tumor immune response in xenograft colorectal cancer models (see e.g., WO 2014/022332; Huang, et al. (2014), supra). In other embodiments, co-blockade of CEACAM-1 and PD-1 reduce T cell tolerance as described, e.g., in WO 2014/059251. Thus, CEACAM inhibitors can be used with the other immunomodulators described herein (e.g., anti-PD-1 and/or anti-TIM-3 inhibitors) to enhance an immune response against a cancer, e.g., a melanoma, a lung cancer (e.g., NSCLC), a bladder cancer, a colon cancer, an ovarian cancer, and other cancers as described herein.

[1118] LAG3 (lymphocyte activation gene-3 or CD223) is a cell surface molecule expressed on activated T cells and B cells that has been shown to play a role in CD8+ T cell exhaustion. Antibodies, antibody fragments, and other inhibitors of LAG3 and its ligands are available in the art and may be used combination with a CD19 CAR described herein. For example, BMS-986016 (Bristol-Myers Squib) is a monoclonal antibody that targets LAG3. IMP701 (Immutep) is an antagonist LAG3 antibody and IMP731 (Immutep and GlaxoSmithKline) is a depleting LAG3 antibody. Other LAG3 inhibitors include IMP321 (Immutep), which is a recombinant fusion protein of a soluble portion of LAG3 and Ig that binds to WIC class II molecules and activates antigen presenting cells (APC). Other antibodies are disclosed, e.g., in WO2010/019570.

[1119] In one embodiment, the anti-LAG3 antibody or fragment thereof is an anti-LAG3 antibody molecule as described in US 2015/0259420, entitled “Antibody Molecules to LAG3 and Uses Thereof,” incorporated by reference in its entirety. In one embodiment, the anti-LAG3 antibody molecule includes at least one, two, three, four, five or six CDRs (or collectively all of the CDRs) from a heavy and light chain variable region from an antibody chosen from any of BAP050-hum01, BAP050-hum02, BAP050-hum03, BAP050-hum04, BAP050-hum05, BAP050-hum06, BAP050-hum07, BAP050-hum08, BAP050-hum09, BAP050-hum10, BAP050-hum11, BAP050-hum12, BAP050-hum13, BAP050-hum14, BAP050-hum15, BAP050-hum16, BAP050-hum17, BAP050-hum18, BAP050-hum19, BAP050-hum20, huBAP050(Ser) (e.g., BAP050-hum01-Ser, BAP050-hum02-Ser, BAP050-hum03-Ser, BAP050-hum04-Ser, BAP050-hum05-Ser, BAP050-hum06-Ser, BAP050-hum07-Ser, BAP050-hum08-Ser, BAP050-hum09-Ser, BAP050-hum10-Ser, BAP050-hum11-Ser, BAP050-hum12-Ser, BAP050-hum13-Ser, BAP050-hum14-Ser, BAP050-hum15-Ser, BAP050-hum18-Ser, BAP050-hum19-Ser, or BAP050-hum20-Ser), BAP050-Clone-F, BAP050-Clone-G, BAP050-Clone-H, BAP050-Clone-I, or BAP050-Clone-J; or as described in Table 1 of US 2015/0259420; or encoded by the nucleotide sequence in Table 1; or a sequence substantially identical (e.g., at least 80%, 85%, 90%, 92%, 95%, 97%, 98%, 99% or higher identical) to any of the aforesaid sequences, or closely related CDRs, e.g., CDRs which are identical or which have at least one amino acid alteration, but not more than two, three or four alterations (e.g., substitutions, deletions, or insertions, e.g., conservative substitutions).

[1120] In yet another embodiment, the anti-LAG3 antibody molecule comprises at least one, two, three or four variable regions from an antibody described herein, e.g., an antibody chosen from any of BAP050-hum01, BAP050-hum02, BAP050-hum03, BAP050-hum04, BAP050-hum05, BAP050-hum06, BAP050-hum07, BAP050-hum08, BAP050-hum09, BAP050-hum10, BAP050-hum11, BAP050-hum12, BAP050-hum13, BAP050-hum14, BAP050-hum15, BAP050-hum16, BAP050-hum17, BAP050-hum18, BAP050-hum19, BAP050-hum20, huBAP050(Ser) (e.g., BAP050-hum01-Ser, BAP050-hum02-Ser, BAP050-hum03-Ser, BAP050-hum04-Ser, BAP050-hum05-Ser, BAP050-hum06-Ser, BAP050-hum07-Ser, BAP050-hum08-Ser, BAP050-hum09-Ser, BAP050-hum10-Ser, BAP050-hum11-Ser, BAP050-hum12-Ser, BAP050-hum13-Ser, BAP050-hum14-Ser, BAP050-hum15-Ser, BAP050-hum18-Ser, BAP050-hum19-Ser, or BAP050-hum20-Ser), BAP050-Clone-F, BAP050-Clone-G, BAP050-Clone-H, BAP050-Clone-I, or BAP050-Clone-J; or as described in Table 1 of US 2015/0259420; or encoded by the nucleotide sequence in Tables 1; or a sequence substantially identical (e.g., at least 80%, 85%, 90%, 92%, 95%, 97%, 98%, 99% or higher identical) to any of the aforesaid sequences.

[1121] While not wishing to be bound by theory, in some embodiments, a tumor microenvironment is not conducive to CART cells attacking cancer cells, due to direct or indirect inhibitory effects exerted by the presence of PD-L1+ expressing cells or PD1+ T cells within the tumor microenvironment. More specifically, a tumor microenvironment can comprise tumor cells (which are generally CD19+), immune effector cells (which can be CD3+ T cells and can be PD1+ or PD1−, and which can be endogenous cells or CAR-expressing cells), and activated myeloid cells (which are generally PD-L1+). PD1+ T cells can create a “barrier” around the tumor microenvironment by preventing entry of CART cells the tumor. According to the non-limiting theory herein, pre-administration of a PD1 inhibitor and/or PD-L1 inhibitor makes the tumor microenvironment more favorable to entry of CAR-expressing cells into the tumor microenvironment and effectively clear the target positive cancer cells. Data supporting this model is provided herein, e.g., in Examples 20 and 21.

[1122] Accordingly, in certain aspects, the present disclosure provides methods of combination therapy comprising administering to a subject a cell that expresses a CAR molecule that binds CD19, e.g., a CD19 CAR, in combination with a PD1 inhibitor, a PD-L1 inhibitor, or both. In some embodiments, the PD1 inhibitor and/or PD-L1 inhibitor is administered before the CAR therapy. In other embodiments, the PD1 inhibitor and/or PD-L1 inhibitor is administered concurrently with or after the CAR therapy. In some aspects, the subject is a subject having a disease associated with expression of CD19, e.g., a hematologic malignancy, e.g., a leukemia or lymphoma, e.g., DLBCL, e.g. primary DLBCL. In some embodiments, the patient has, or is identified as having, elevated levels of PD1, PDL1, or CD3, or any combination thereof. In some embodiments, the patient has, or is identified as having, or at least 5%, 6%, 7%, 8%, 9%, 10%, 20%, 30%, 40%, 50%, 60%, 70%, 80%, or 90% of DLBCL cells which are positive for CD3 and PD1.

[1123] Also provided herein are methods for monitoring the efficacy of a CAR therapy, e.g., a CD19 CAR therapy. CAR-expressing cells can be administered to a patient's bloodstream with the intent that the cells home to a tumor cell, e.g., infiltrate a tumor. Accordingly, in some embodiments, the method comprises assaying a tumor sample for the presence of CAR-expressing cells. In embodiments, the method comprises detecting a tumor marker, e.g., CD19. In embodiments, the method comprises detecting a marker of a CAR-expressing cell, e.g., a CAR construct or nucleic acid encoding the CAR construct. In embodiments, the method further comprises detecting a T cell marker, e.g., CD3. In some aspects, the subject is a subject having a disease associated with expression of CD19, e.g., a hematologic malignancy, e.g., a leukemia or lymphoma, e.g., DLBCL, e.g. primary DLBCL. In some embodiments, if the CAR-expressing cells show poor infiltration of the tumor, the subject is identified as at an elevated risk of relapse compared to a subject with good infiltration of the tumor. In some embodiments, if the CAR-expressing cells show poor infiltration of the tumor, the subject is administered a PD1 inhibitor and/or PD-L1 inhibitor, e.g., in combination with a second dose of CAR-expressing cells.

[1124] In some embodiments, the agent which enhances the activity of a CAR-expressing cell can be, e.g., a fusion protein comprising a first domain and a second domain, wherein the first domain is an inhibitory molecule, or fragment thereof, and the second domain is a polypeptide that is associated with a positive signal, e.g., a polypeptide comprising an intracellular signaling domain as described herein. In some embodiments, the polypeptide that is associated with a positive signal can include a costimulatory domain of CD28, CD27, ICOS, e.g., an intracellular signaling domain of CD28, CD27 and/or ICOS, and/or a primary signaling domain, e.g., of CD3 zeta, e.g., described herein. In one embodiment, the fusion protein is expressed by the same cell that expressed the CAR. In another embodiment, the fusion protein is expressed by a cell, e.g., a T cell that does not express an anti-CD19 CAR.

[1125] In one embodiment, the agent which enhances activity of a CAR-expressing cell described herein is miR-17-92.

[1126] In one embodiment, the agent which enhances activity of a CAR-described herein is a cytokine. Cytokines have important functions related to T cell expansion, differentiation, survival, and homeostasis. Cytokines that can be administered to the subject receiving a CAR-expressing cell described herein include: IL-2, IL-4, IL-7, IL-9, IL-15, IL-18, and IL-21, or a combination thereof. In embodiments, the cytokine administered is IL-7, IL-15, or IL-21, or a combination thereof. The cytokine can be administered once a day or more than once a day, e.g., twice a day, three times a day, or four times a day. The cytokine can be administered for more than one day, e.g. the cytokine is administered for 2 days, 3 days, 4 days, 5 days, 6 days, 1 week, 2 weeks, 3 weeks, or 4 weeks. For example, the cytokine is administered once a day for 7 days.

[1127] In embodiments, the cytokine is administered in combination with CAR-expressing cells. The cytokine can be administered simultaneously or concurrently with the CAR-expressing cells, e.g., administered on the same day. The cytokine may be prepared in the same pharmaceutical composition as the CAR-expressing cells, or may be prepared in a separate pharmaceutical composition. Alternatively, the cytokine can be administered shortly after administration of the CAR-expressing T cells, e.g., 1 day, 2 days, 3 days, 4 days, 5 days, 6 days, or 7 days after administration of the CAR-expressing cells. In embodiments where the cytokine is administered in a dosing regimen that occurs over more than one day, the first day of the cytokine dosing regimen can be on the same day as administration with the CAR-expressing cells, or the first day of the cytokine dosing regimen can be 1 day, 2 days, 3 days, 4 days, 5 days, 6 days, or 7 days after administration of the CAR-expressing T cells. In one embodiment, on the first day, the CAR-expressing cells are administered to the subject, and on the second day, a cytokine is administered once a day for the next 7 days. In an embodiment, the cytokine to be administered in combination with the CAR-expressing cells is IL-7, IL-15, and/or IL-21.

[1128] In other embodiments, the cytokine is administered a sufficient period of time after administration of the CAR-expressing cells, e.g., at least 2 weeks, 3 weeks, 4 weeks, 6 weeks, 8 weeks, 10 weeks, 12 weeks, 4 months, 5 months, 6 months, 7 months, 8 months, 9 months, 10 months, 11 months, or 1 year or more after administration of CAR-expressing cells. In one embodiment, the cytokine is administered after assessment of the subject's response to the CAR-expressing cells. For example, the subject is administered CAR-expressing cells according to the dosage and regimens described herein. The response of the subject to CART therapy is assessed at 2 weeks, 3 weeks, 4 weeks, 6 weeks, 8 weeks, 10 weeks, 12 weeks, 4 months, 5 months, 6 months, 7 months, 8 months, 9 months, 10 months, 11 months, or 1 year or more after administration of CAR-expressing cells, using any of the methods described herein, including inhibition of tumor growth, reduction of circulating tumor cells, or tumor regression. Subjects that do not exhibit a sufficient response to CART therapy can be administered a cytokine. Administration of the cytokine to the subject that has sub-optimal response to the CART therapy improves CART efficacy and/or anti-tumor activity. In an embodiment, the cytokine administered after administration of CAR-expressing cells is IL-7.

[1129] Further combination therapies may include anti-allergenic agents, anti-emetics, analgesics, adjunct therapies,

[1130] Some patients may experience allergic reactions to the therapeutics described herein and/or other anti-cancer agent(s) during or after administration; therefore, anti-allergic agents are often administered to minimize the risk of an allergic reaction. Suitable anti-allergic agents include corticosteroids, such as dexamethasone (e.g., Decadron®), beclomethasone (e.g., Beclovent®), hydrocortisone (also known as cortisone, hydrocortisone sodium succinate, hydrocortisone sodium phosphate, and sold under the tradenames Ala-Cort®, hydrocortisone phosphate, Solu-Cortef®, Hydrocort Acetate® and Lanacort®), prednisolone (sold under the tradenames Delta-Cortel®, Orapred®, Pediapred® and Prelone®), prednisone (sold under the tradenames Deltasone®, Liquid Red®, Meticorten® and Orasone®), methylprednisolone (also known as 6-methylprednisolone, methylprednisolone acetate, methylprednisolone sodium succinate, sold under the tradenames Duralone®, Medralone®, Medrol®, M-Prednisol® and Solu-Medrol®); antihistamines, such as diphenhydramine (e.g., Benadryl®), hydroxyzine, and cyproheptadine; and bronchodilators, such as the beta-adrenergic receptor agonists, albuterol (e.g., Proventil®), and terbutaline (Brethine®).

[1131] Some patients may experience nausea during and after administration of the therapeutics described herein and/or other anti-cancer agent(s); therefore, anti-emetics are used in preventing nausea (upper stomach) and vomiting. Suitable anti-emetics include aprepitant (Emend®), ondansetron (Zofran®), granisetron HCl (Kytril®), lorazepam (Ativan®. dexamethasone (Decadron®), prochlorperazine (Compazine®), casopitant (Rezonic® and Zunrisa®), and combinations thereof.

[1132] Medication to alleviate the pain experienced during the treatment period is often prescribed to make the patient more comfortable. Common over-the-counter analgesics, such Tylenol®, are often used. However, opioid analgesic drugs such as hydrocodone/paracetamol or hydrocodone/acetaminophen (e.g., Vicodin®), morphine (e.g., Astramorph® or Avinza®), oxycodone (e.g., OxyContin® or Percocet®), oxymorphone hydrochloride (Opana®), and fentanyl (e.g., Duragesic®) are also useful for moderate or severe pain.

[1133] In an effort to protect normal cells from treatment toxicity and to limit organ toxicities, cytoprotective agents (such as neuroprotectants, free-radical scavengers, cardioprotectors, anthracycline extravasation neutralizers, nutrients and the like) may be used as an adjunct therapy. Suitable cytoprotective agents include Amifostine (Ethyol®), glutamine, dimesna (Tavocept®), mesna (Mesnex®), dexrazoxane (Zinecard® or Totect®), xaliproden (Xaprila®), and leucovorin (also known as calcium leucovorin, citrovorum factor and folinic acid).

[1134] The structure of the active compounds identified by code numbers, generic or trade names may be taken from the actual edition of the standard compendium “The Merck Index” or from databases, e.g. Patents International (e.g. IMS World Publications).

[1135] The above-mentioned compounds, which can be used in combination with a compound of the present invention, can be prepared and administered as described in the art, such as in the documents cited above.

[1136] In one embodiment, the present invention provides pharmaceutical compositions comprising at least one compound of the present invention (e.g., a compound of the present invention) or a pharmaceutically acceptable salt thereof together with a pharmaceutically acceptable carrier suitable for administration to a human or animal subject, either alone or together with other anti-cancer agents.

[1137] In one embodiment, the present invention provides methods of treating human or animal subjects suffering from a cellular proliferative disease, such as cancer. The present invention provides methods of treating a human or animal subject in need of such treatment, comprising administering to the subject a therapeutically effective amount of a compound of the present invention (e.g., a compound of the present invention) or a pharmaceutically acceptable salt thereof, either alone or in combination with other anti-cancer agents.

[1138] In particular, compositions will either be formulated together as a combination therapeutic or administered separately.

[1139] In combination therapy, the compound of the present invention and other anti-cancer agent(s) may be administered either simultaneously, concurrently or sequentially with no specific time limits, wherein such administration provides therapeutically effective levels of the two compounds in the body of the patient.

[1140] In a preferred embodiment, the compound of the present invention and the other anti-cancer agent(s) is generally administered sequentially in any order by infusion or orally. The dosing regimen may vary depending upon the stage of the disease, physical fitness of the patient, safety profiles of the individual drugs, and tolerance of the individual drugs, as well as other criteria well-known to the attending physician and medical practitioner(s) administering the combination. The compound of the present invention and other anti-cancer agent(s) may be administered within minutes of each other, hours, days, or even weeks apart depending upon the particular cycle being used for treatment. In addition, the cycle could include administration of one drug more often than the other during the treatment cycle and at different doses per administration of the drug.

[1141] In another aspect of the present invention, kits that include one or more compound of the present invention and a combination partner as disclosed herein are provided. Representative kits include (a) a compound of the present invention or a pharmaceutically acceptable salt thereof, (b) at least one combination partner, e.g., as indicated above, whereby such kit may comprise a package insert or other labeling including directions for administration.

[1142] A compound of the present invention may also be used to advantage in combination with known therapeutic processes, for example, the administration of hormones or especially radiation. A compound of the present invention may in particular be used as a radiosensitizer, especially for the treatment of tumors which exhibit poor sensitivity to radiotherapy.

Combination with a Low, Immune-Enhancing Dose of an mTOR Inhibitor

[1143] In one embodiment, the cells expressing a CAR molecule, e.g., a CAR molecule described herein, are administered in combination with a low, immune enhancing dose of an mTOR inhibitor. For instance, in an embodiment, the combination therapy includes: CD19 CAR expressing cells, a B-cell inhibitor (inhibitor of one or more of CD10, CD20, CD22, CD34, CD123, FLT-3, or ROR1, e.g., a CAR-expressing cell targeting one or more of CD10, CD20, CD22, CD34, CD123, FLT-3, or ROR1), and an mTOR inhibitor. Methods described herein use low, immune enhancing, doses of mTOR inhibitors, e.g., allosteric mTOR inhibitors, including rapalogs such as RAD001. Administration of a low, immune enhancing, dose of an mTOR inhibitor (e.g., a dose that is insufficient to completely suppress the immune system, but sufficient to improve immune function) can optimize the performance of immune effector cells, e.g., T cells or CAR-expressing cells, in the subject. Methods for measuring mTOR inhibition, dosages, treatment regimens, and suitable pharmaceutical compositions are described in U.S. Patent Application No. 2015/01240036, hereby incorporated by reference.

[1144] In an embodiment, administration of a low, immune enhancing, dose of an mTOR inhibitor can result in one or more of the following:
[1145] i) a decrease in the number of PD-1 positive immune effector cells;
[1146] ii) an increase in the number of PD-1 negative immune effector cells;
[1147] iii) an increase in the ratio of PD-1 negative immune effector cells/PD-1 positive immune effector cells;
[1148] iv) an increase in the number of naive T cells;
[1149] v) an increase in the expression of one or more of the following markers: CD62L^{high}, CD127^{high}, CD27⁺, and BCL2, e.g., on memory T cells, e.g., memory T cell precursors;
[1150] vi) a decrease in the expression of KLRG1, e.g., on memory T cells, e.g., memory T cell precursors; or
[1151] vii) an increase in the number of memory T cell precursors, e.g., cells with any one or combination of the following characteristics: increased CD62L^{high}, increased CD127^{high}, increased CD27⁺, decreased KLRG1, and increased BCL2;
[1152] and wherein any of the foregoing, e.g., i), ii), iii), iv), v), vi), or vii), occurs e.g., at least transiently, e.g., as compared to a non-treated subject.

[1153] In another embodiment, administration of a low, immune enhancing, dose of an mTOR inhibitor results in increased or prolonged proliferation or persistence of CAR-expressing cells, e.g., in culture or in a subject, e.g., as compared to non-treated CAR-expressing cells or a non-treated subject. In embodiments, increased proliferation or persistence is associated with in an increase in the number of CAR-expressing cells. Methods for measuring increased or prolonged proliferation are described in Examples 18 and 19. In another embodiment, administration of a low, immune enhancing, dose of an mTOR inhibitor results in increased killing of cancer cells by CAR-expressing cells, e.g., in culture or in a subject, e.g., as compared to non-treated CAR-expressing cells or a non-treated subject. In embodiments, increased killing of cancer cells is associated with in a decrease in tumor volume.

[1154] In one embodiment, the cells expressing a CAR molecule, e.g., a CAR molecule described herein, are administered in combination with a low, immune enhancing dose of an mTOR inhibitor, e.g., an allosteric mTOR inhibitor, e.g., RAD001, or a catalytic mTOR inhibitor. For example, administration of the low, immune enhancing, dose of the mTOR inhibitor can be initiated prior to administration of a CAR-expressing cell described herein; completed prior to administration of a CAR-expressing cell described herein; initiated at the same time as administration of a CAR-expressing cell described herein; overlapping with administration of a CAR-expressing cell described herein; or continuing after administration of a CAR-expressing cell described herein.

[1155] Alternatively or in addition, administration of a low, immune enhancing, dose of an mTOR inhibitor can optimize immune effector cells to be engineered to express a CAR molecule described herein. In such embodiments, administration of a low, immune enhancing, dose of an mTOR inhibitor, e.g., an allosteric inhibitor, e.g., RAD001, or a catalytic inhibitor, is initiated or completed prior to harvest of immune effector cells, e.g., T cells or NK cells, to be engineered to express a CAR molecule described herein, from a subject.

[1156] In another embodiment, immune effector cells, e.g., T cells or NK cells, to be engineered to express a CAR molecule described herein, e.g., after harvest from a subject, or CAR-expressing immune effector cells, e.g., T cells or NK cells, e.g., prior to administration to a subject, can be cultured in the presence of a low, immune enhancing, dose of an mTOR inhibitor.

[1157] In an embodiment, administering to the subject a low, immune enhancing, dose of an mTOR inhibitor comprises administering, e.g., once per week, e.g., in an immediate release dosage form, 0.1 to 20, 0.5 to 10, 2.5 to 7.5, 3 to 6, or about 5, mgs of RAD001, or a bioequivalent dose thereof. In an embodiment, administering to the subject a low, immune enhancing, dose of an mTOR inhibitor comprises administering, e.g., once per week, e.g., in a sustained release dosage form, 0.3 to 60, 1.5 to 30, 7.5 to 22.5, 9 to 18, or about 15 mgs of RAD001, or a bioequivalent dose thereof.

[1158] In an embodiment, a dose of an mTOR inhibitor is associated with, or provides, mTOR inhibition of at least 5 but no more than 90%, at least 10 but no more than 90%, at least 15, but no more than 90%, at least 20 but no more than 90%, at least 30 but no more than 90%, at least but no more than 90%, at least 50 but no more than 90%, at least 60 but no more than 90%, at least 70 but no more than 90%, at least 5 but no more than 80%, at least 10 but no more than 80%, at least 15, but no more than 80%, at least 20 but no more than 80%, at least 30 but no more than 80%, at least 40 but no more than 80%, at least 50 but no more than 80%, at least 60 but no more than 80%, at least 5 but no more than 70%, at least 10 but no more than 70%, at least 15, but no more than 70%, at least 20 but no more than 70%, at least 30 but no more than 70%, at least 40 but no more than 70%, at least 50 but no more than 70%, at least 5 but no more than 60%, at least 10 but no more than 60%, at least 15, but no more than 60%, at least 20 but no more than 60%, at least 30 but no more than 60%, at least 40 but no more than 60%, at least but no more than 50%, at least 10 but no more than 50%, at least 15, but no more than 50%, at least 20 but no more than 50%, at least 30 but no more than 50%, at least 40 but no more than 50%, at least 5 but no more than 40%, at least 10 but no more than 40%, at least 15, but no more than 40%, at least 20 but no more than 40%, at least 30 but no more than 40%, at least 35 but no more than 40%, at least 5 but no more than 30%, at least 10 but no more than 30%, at least 15, but no more than 30%, at least 20 but no more than 30%, or at least 25 but no more than 30%.

[1159] The extent of mTOR inhibition can be conveyed as, or corresponds to, the extent of P70 S6 kinase inhibition, e.g., the extent of mTOR inhibition can be determined by the level of decrease in P70 S6 kinase activity, e.g., by the decrease in phosphorylation of a P70 S6 kinase substrate. The level of mTOR inhibition can be evaluated by various methods, such as measuring P70 S6 kinase activity by the Boulay assay, as described in U.S. Patent Application No. 2015/01240036, hereby incorporated by reference, or as described in U.S. Pat. No. 7,727,950, hereby incorporated by reference; measuring the level of phosphorylated S6 by western blot; or evaluating a change in the ratio of PD1 negative immune effector cells to PD1 positive immune effector cells.

[1160] As used herein, the term “mTOR inhibitor” refers to a compound or ligand, or a pharmaceutically acceptable salt thereof, which inhibits the mTOR kinase in a cell. In an embodiment, an mTOR inhibitor is an allosteric inhibitor. Allosteric mTOR inhibitors include the neutral tricyclic compound rapamycin (sirolimus), rapamycin-related compounds, that is compounds having structural and functional similarity to rapamycin including, e.g., rapamycin derivatives, rapamycin analogs (also referred to as rapalogs) and other macrolide compounds that inhibit mTOR activity. In an embodiment, an mTOR inhibitor is a catalytic inhibitor.

[1161] Rapamycin is a known macrolide antibiotic produced by Streptomyces hygroscopicus having the structure shown in Formula A.

[chemical structure]

[1162] See, e.g., McAlpine, J. B., et al., J. Antibiotics (1991) 44: 688; Schreiber, S. L., et al., J. Am. Chem. Soc. (1991) 113: 7433; U.S. Pat. No. 3,929,992. There are various numbering schemes proposed for rapamycin. To avoid confusion, when specific rapamycin analogs are named herein, the names are given with reference to rapamycin using the numbering scheme of formula A.

[1163] Rapamycin analogs useful in the invention are, for example, O-substituted analogs in which the hydroxyl group on the cyclohexyl ring of rapamycin is replaced by OR₁ in which R₁ is hydroxyalkyl, hydroxyalkoxyalkyl, acylaminoalkyl, or aminoalkyl; e.g. RAD001, also known as everolimus, as described in U.S. Pat. No. 5,665,772 and WO94/09010, the contents of each are incorporated by reference.

[1164] Other suitable rapamycin analogs include those substituted at the 26- or 28-position. The rapamycin analog may be an epimer of an analog mentioned above, particularly an epimer of an analog substituted in position 40, 28 or 26, and may optionally be further hydrogenated, e.g. as described in U.S. Pat. No. 6,015,815, WO95/14023 and WO99/15530 the contents of which are incorporated by reference, e.g. ABT578 also known as zotarolimus or a rapamycin analog described in U.S. Pat. No. 7,091,213, WO98/02441 and WO01/14387 the contents of which are incorporated by reference, e.g. AP23573 also known as ridaforolimus.

[1165] Examples of rapamycin analogs suitable for use in the present invention from U.S. Pat. No. 5,665,772 include, but are not limited to, 40-O-benzyl-rapamycin, 40-O-(4′-hydroxymethyl)benzyl-rapamycin, 40-O-[4′-(1,2-dihydroxyethyl)]benzyl-rapamycin, 40-O-allyl-rapamycin, 40-O-[3′-(2,2-dimethyl-1,3-dioxolan-4(S)-yl)-prop-2′-en-1′-yl]-rapamycin, (2′E,4′S)-40-O-(4′,5′-dihydroxypent-2′-en-1′-yl)-rapamycin, 40-O-(2-hydroxy)ethoxycarbonylmethyl-rapamycin, 40-O-(2-hydroxy)ethyl-rapamycin, 40-O-(3-hydroxy)propyl-rapamycin, 40-O-(6-hydroxy)hexyl-rapamycin, 40-O-[2-(2-hydroxy)ethoxy]ethyl-rapamycin, 40-O-[(3S)-2,2-dimethyldioxolan-3-yl]methyl-rapamycin, 40-O-[(2S)-2,3-dihydroxyprop-1-yl]-rapamycin, 40-O-(2-acetoxy)ethyl-rapamycin, 40-O-(2-nicotinoyloxy)ethyl-rapamycin, 40-O-[2-(N-morpholino)acetoxy]ethyl-rapamycin, 40-O-(2-(N-imidazolylacetoxy)ethyl-rapamycin, 40-O-[2-(N-methyl-N′-piperazinyl)acetoxy]ethyl-rapamycin, 39-O-desmethyl-39,40-O,O-ethylene-rapamycin, (26R)-26-dihydro-40-O-(2-hydroxy)ethyl-rapamycin, 40-O-(2-aminoethyl)-rapamycin, 40-O-(2-acetaminoethyl)-rapamycin, 40-O-(2-nicotinamidoethyl)-rapamycin, 40-O-(2-(N-methyl-imidazo-2′-ylcarbethoxamido)ethyl)-rapamycin, 40-O-(2-ethoxycarbonylaminoethyl)-rapamycin, 40-O-(2-tolylsulfonamidoethyl)-rapamycin and 40-O-[2-(4′,5′-dicarboethoxy-1′,2′,3′-triazol-1′-yl)-ethyl]-rapamycin.

[1166] Other rapamycin analogs useful in the present invention are analogs where the hydroxyl group on the cyclohexyl ring of rapamycin and/or the hydroxy group at the 28 position is replaced with an hydroxyester group are known, for example, rapamycin analogs found in U.S. RE44,768, e.g. temsirolimus.

[1167] Other rapamycin analogs useful in the preset invention include those wherein the methoxy group at the 16 position is replaced with another substituent, e.g., (optionally hydroxy-substituted) alkynyloxy, benzyl, orthomethoxybenzyl or chlorobenzyl and/or wherein the mexthoxy group at the 39 position is deleted together with the 39 carbon so that the cyclohexyl ring of rapamycin becomes a cyclopentyl ring lacking the 39 position methyoxy group; e.g. as described in WO95/16691 and WO96/41807, the contents of which are incorporated by reference. The analogs can be further modified such that the hydroxy at the 40-position of rapamycin is alkylated and/or the 32-carbonyl is reduced.

[1168] Rapamycin analogs from WO95/16691 include, but are not limited to, 16-demethoxy-16-(pent-2-ynyl)oxy-rapamycin, 16-demthoxy-16-(but-2-ynyl)oxy-rapamycin, 16-demthoxy-16-(propargyl)oxy-rapamycin, 16-demethoxy-16-(4-hydroxy-but-2-ynyl)oxy-rapamycin, 16-demthoxy-16-benzyloxy-40-O-(2-hydroxyethyl)-rapamycin, 16-demethoxy-16-benzyloxy-rapamycin, 16-demethoxy-16-ortho-methoxybenzyl-rapamycin, 16-demethoxy-40-O-(2-methoxyethyl)-16-pent-2-ynyl)oxy-rapamycin, 39-demethoxy-40-desoxy-39-formyl-42-nor-rapamycin, 39-demethoxy-40-desoxy-39-hydroxymethyl-42-nor-rapamycin, 39-demethoxy-40-desoxy-39-carboxy-42-nor-rapamycin, 39-demethoxy-40-desoxy-39-(4-methyl-piperazin-1-yl)carbonyl-42-nor-rapamycin, 39-demethoxy-40-desoxy-39-(morpholin-4-yl)carbonyl-42-nor-rapamycin, 39-demethoxy-40-desoxy-39-[N-methyl, N-(2-pyridin-2-yl-ethyl)]carbamoyl-42-nor-rapamycin and 39-demethoxy-40-desoxy-39-(p-toluenesulfonylhydrazonomethyl)-42-nor-rapamycin.

[1169] Rapamycin analogs from WO96/41807 include, but are not limited to, 32-deoxo-rapamycin, 16-O-pent-2-ynyl-32-deoxo-rapamycin, 16-O-pent-2-ynyl-32-deoxo-40-O-(2-hydroxy-ethyl)-rapamycin, 16-O-pent-2-ynyl-32-(S)-dihydro-40-O-(2-hydroxyethyl)-rapamycin, 32(S)-dihydro-40-O-(2-methoxy)ethyl-rapamycin and 32(S)-dihydro-40-O-(2-hydroxyethyl)-rapamycin.

[1170] Another suitable rapamycin analog is umirolimus as described in US2005/0101624 the contents of which are incorporated by reference.

[1171] RAD001, otherwise known as everolimus (Afinitor®), has the chemical name (1R,9S,12S,15R,16E,18R,19R,21R,23S,24E,26E,28E,30S,32S,35R)-1,18-dihydroxy-12-{(1R)-2-[(1S,3R,4R)-4-(2-hydroxyethoxy)-3-methoxycyclohexyl]-1-methylethyl}-19,30-dimethoxy-15,17,21,23,29,35-hexamethyl-11,36-dioxa-4-aza-tricyclo[30.3.1.04,9]hexatriaconta-16,24,26,28-tetraene-2,3,10,14,20-pentaone, as described in U.S. Pat. No. 5,665,772 and WO94/09010, the contents of each are incorporated by reference.

[1172] Further examples of allosteric mTOR inhibitors include sirolimus (rapamycin, AY-22989), 40-[3-hydroxy-2-(hydroxymethyl)-2-methylpropanoate]-rapamycin (also called temsirolimus or CCI-779) and ridaforolimus (AP-23573/MK-8669). Other examples of allosteric mTor inhibitors include zotarolimus (ABT578) and umirolimus.

[1173] Alternatively or additionally, catalytic, ATP-competitive mTOR inhibitors have been found to target the mTOR kinase domain directly and target both mTORC1 and mTORC2. These are also more effective inhibitors of mTORC1 than such allosteric mTOR inhibitors as rapamycin, because they modulate rapamycin-resistant mTORC1 outputs such as 4EBP1-T37/46 phosphorylation and cap-dependent translation.

[1174] Catalytic inhibitors include: BEZ235 or 2-methyl-244-(3-methyl-2-oxo-8-quinolin-3-yl-2,3-dihydro-imidazo[4,5-c]quinolin-1-yl)-phenyl]-propionitrile, or the monotosylate salt form (the synthesis of BEZ235 is described in WO2006/122806); CCG168 (otherwise known as AZD-8055, Chresta, C. M., et al., Cancer Res, 2010, 70(1), 288-298) which has the chemical name {5-[2,4-bis-((S)-3-methyl-morpholin-4-yl)-pyrido[2,3d]pyrimidin-7-yl]-2-methoxy-phenyl}-methanol; 3-[2,4-bis[(3S)-3-methylmorpholin-4-yl]pyrido[2,3-d]pyrimidin-7-yl]-N-methylbenzamide (WO09104019); 3-(2-aminobenzo[d]oxazol-5-yl)-1-isopropyl-1H-pyrazolo[3,4-d]pyrimidin-4-amine (WO10051043 and WO2013023184); A N-(3-(N-(3-((3,5-dimethoxyphenyl)amino)quinoxaline-2-yl)sulfamoyl)phenyl)-3-methoxy-4-methylbenzamide (WO07044729 and WO12006552); PKI-587 (Venkatesan, A. M., J. Med. Chem., 2010, 53, 2636-2645) which has the chemical name 1-[4-[4-(dimethylamino)piperidine-1-carbonyl]phenyl]-3-[4-(4,6-dimorpholino-1,3,5-triazin-2-yl)phenyflurea; GSK-2126458 (ACS Med. Chem. Lett., 2010, 1, 39-43) which has the chemical name 2,4-difluoro-N-{2-methoxy-5-[4-(4-pyridazinyl)-6-quinolinyl]-3-pyridinyl}benzenesulfonamide; 5-(9-isopropyl-8-methyl-2-morpholino-9H-purin-6-yl)pyrimidin-2-amine (WO10114484); and (E)-N-(8-(6-amino-5-(trifluoromethyl)pyridin-3-yl)-1-(6-(2-cyanopropan-2-yl)pyridin-3-yl)-3-methyl-1H-imidazo[4,5-c]quinolin-2(3H)-ylidene)cyanamide (WO12007926).

[1175] Further examples of catalytic mTOR inhibitors include 8-(6-methoxy-pyridin-3-yl)-3-methyl-1-(4-piperazin-1-yl-3-trifluoromethyl-phenyl)-1,3-dihydro-imidazo[4,5-c]quinolin-2-one (WO2006/122806) and Ku-0063794 (Garcia-Martinez J M, et al., Biochem J., 2009, 421(1), 29-42. Ku-0063794 is a specific inhibitor of the mammalian target of rapamycin (mTOR).) WYE-354 is another example of a catalytic mTOR inhibitor (Yu K, et al. (2009). Biochemical, Cellular, and In vivo Activity of Novel ATP-Competitive and Selective Inhibitors of the Mammalian Target of Rapamycin. Cancer Res. 69(15): 6232-6240).

[1176] mTOR inhibitors useful according to the present invention also include prodrugs, derivatives, pharmaceutically acceptable salts, or analogs thereof of any of the foregoing. mTOR inhibitors, such as RAD001, may be formulated for delivery based on well-established methods in the art based on the particular dosages described herein. In particular, U.S. Pat. No. 6,004,973 (incorporated herein by reference) provides examples of formulations useable with the mTOR inhibitors described herein.

### Methods and Biomarkers for Evaluating CAR-Effectiveness or Sample Suitability

[1177] The present disclosure provides, among other things, gene signatures that indicate whether a cancer patient treated with a CAR therapy is likely to relapse, or has relapsed. Without wishing to be bound by theory, an experimental basis for this gene signature is set out in Example 12.

[1178] In an embodiment, novel transcriptional gene signatures described herein (e.g., in Table 29 in Example 12) are used to enable manufactured product improvements, thereby reducing the likelihood of patient relapse. In an embodiment, gene signatures described herein are used to modify therapeutic application of manufactured product, thereby reducing the likelihood of patient relapse.

[1179] In an embodiment, gene signatures described herein (e.g., in Table 29 in Example 12) are identified in a subject prior to treatment with a CAR-expressing cell, e.g., CART treatment (e.g., a CART19 treatment, e.g., CTL019 therapy) that predict relapse to CAR treatment. In an embodiment, gene signatures described herein are identified in an apheresis sample or bone marrow sample. In an embodiment, gene signatures described herein are identified in a manufactured CAR-expressing cell product, e.g., CART product (e.g., a CART19 product, e.g., CTL019) prior to infusion.

[1180] This disclosure also provides evidence, for instance in Example 12, that (without wishing to be bound by theory) decreasing the T_{REG} signature in the patient prior to apheresis or during manufacturing of the CART product reduces the risk of patient relapse.

[1181] In an embodiment, a patient is pre-treated with one or more therapies that reduce T_{REG} cells prior to collection of cells for CAR product manufacturing, e.g., CART product manufacturing, thereby reducing the risk of patient relapse to CAR-expressing cell treatment (e.g., CTL019 treatment). Methods of decreasing T_{REG} cells include, but are not limited to, cyclophosphamide, anti-GITR antibody, CD25-depletion, and combinations thereof.

[1182] In an embodiment, a patient is pre-treated with cyclophosphamide or an anti-GITR antibody prior to collection of cells for CAR-expressing cell product manufacturing, thereby reducing the risk of patient relapse to CAR-expressing cell treatment (e.g., CTL019 treatment).

[1183] In an embodiment, the CAR-expressing cell manufacturing process is modified to deplete T_{REG} cells prior to manufacturing of the CAR-expressing cell product (e.g., a CTL019 product). In an embodiment, CD25-depletion is used to deplete T_{REG} cells prior to manufacturing of the CAR-expressing cell product (e.g., a CTL019 product).

[1184] In an embodiment, after treating a patient or a CAR-expressing cell product with a treatment that reduces T_{REG} cells, the patient is treated with a combination therapy. The combination therapy may comprise, e.g., a CD19 inhibitor such as a CD19 CAR-expressing cell, and one or more B-cell inhibitors, e.g., B-cell inhibitors as described herein.

[1185] In an embodiment, a patient is assayed for the level of T_{REG} cells in a patient sample, e.g., a sample comprising cancer cells and/or a sample representing a tumor microenvironment. In an embodiment, this information is used to determine a course of treatment for the patient. For instance, in an embodiment, if the patient is identified as having elevated levels of T_{REG} cells compared to a control, the therapy comprises administering a treatment other than a CAR-expressing cell. For instance, the therapy may comprise administration of an antibody molecule, administration of a small molecule therapeutic, surgery, or radiation therapy, or any combination thereof. This therapy may target one or more B-cell antigens.

[1186] In an embodiment, a relapser is a patient having, or who is identified as having, an increased level of expression (e.g., increase in RNA levels) of one or more of (e.g., 2, 3, 4, or all of) the following genes, compared to non relapsers: MIR199A1, MIR1203, uc021ovp, ITM2C, and HLA-DQB1 and/or a decreased levels of expression (e.g., decrease in RNA levels) of one or more of (e.g., 2, 3, 4, 5, 6, 7, 8, 9, 10, 11, or all of) the following genes, compared to non relapsers: PPIAL4D, TTTY10, TXLNG2P, MIR4650-1, KDM5D, USP9Y, PRKY, RPS4Y2, RPS4Y1, NCRNA00185, SULT1E1, and EIF1AY.

[1187] In another aspect, the invention features a method of evaluating or monitoring the effectiveness of a CAR-expressing cell therapy, in a subject (e.g., a subject having a cancer), or the suitability of a sample (e.g., an apheresis sample) for a CAR therapy, e.g., therapy including administration of a low, immune-enhancing dose of an mTOR inhibitor. The method includes acquiring a value of effectiveness to the CAR therapy, or sample suitability, wherein said value is indicative of the effectiveness or suitability of the CAR-expressing cell therapy.

[1188] In embodiments, the value of effectiveness to the CAR therapy, or sample suitability, comprises a measure of one, two, three, four, five, six or more (all) of the following:
[1189] (i) the level or activity of one, two, three, or more (e.g., all) of resting T_{EFF} cells, resting T_{REG} cells, younger T cells (e.g., younger CD4 or CD8 cells, or gamma/delta T cells), or early memory T cells, or a combination thereof, in a sample (e.g., an apheresis sample or a manufactured CAR-expressing cell product sample);
[1190] (ii) the level or activity of one, two, three, or more (e.g., all) of activated T_{EFF} cells, activated T_{REG} cells, older T cells (e.g., older CD4 or CD8 cells), or late memory T cells, or a combination thereof, in a sample (e.g., an apheresis sample or a manufactured CAR-expressing cell product sample);
[1191] (iii) the level or activity of an immune cell exhaustion marker, e.g., one, two or more immune checkpoint inhibitors (e.g., PD-1, PD-L1, TIM-3 and/or LAG-3) in a sample (e.g., an apheresis sample or a manufactured CAR-expressing cell product sample). In one embodiment, an immune cell has an exhausted phenotype, e.g., co-expresses at least two exhaustion markers, e.g., co-expresses PD-1 and TIM-3. In other embodiments, an immune cell has an exhausted phenotype, e.g., co-expresses at least two exhaustion markers, e.g., co-expresses PD-1 and LAG-3;
[1192] (iv) the level or activity of CD27 and/or CD45RO− (e.g., CD27+CD45RO−) immune effector cells, e.g., in a CD4+ or a CD8+ T cell population, in a sample (e.g., an apheresis sample or a manufactured CAR-expressing cell product sample);
[1193] (v) the level or activity of one, two, three, four, five, ten, twelve or more of the biomarkers chosen from CCL20, IL-17a and/or IL-6, PD-1, PD-L1, LAG-3, TIM-3, CD57, CD27, CD122, CD62L, KLRG1;
[1194] (vi) a cytokine level or activity (e.g., quality of cytokine repertoire) in a CAR-expressing cell product sample; or
[1195] (vii) a transduction efficiency of a CAR-expressing cell in a manufactured CAR-expressing cell product sample.

[1196] In some embodiments of any of the methods disclosed herein, the CAR-expressing cell therapy comprises a plurality (e.g., a population) of CAR-expressing immune effector cells, e.g., a plurality (e.g., a population) of T cells or NK cells, or a combination thereof. In one embodiment, the CAR-expressing cell therapy includes administration of a low, immune-enhancing dose of an mTOR inhibitor.

[1197] In some embodiments of any of the methods disclosed herein, the measure of one or more of (i)-(vii) is obtained from an apheresis sample acquired from the subject. The apheresis sample can be evaluated prior to infusion or re-infusion.

[1198] In some embodiments of any of the methods disclosed herein, the measure of one or more of (i)-(vii) is obtained from a manufactured CAR-expressing cell product sample. The manufactured CAR-expressing cell product can be evaluated prior to infusion or re-infusion.

[1199] In some embodiments of any of the methods disclosed herein, the subject is evaluated prior to receiving, during, or after receiving, the CAR-expressing cell therapy.

[1200] In some embodiments of any of the methods disclosed herein, the measure of one or more of (i)-(vii) evaluates a profile for one or more of gene expression, flow cytometry or protein expression.

[1201] In some embodiments of any of the methods disclosed herein, the method further comprises identifying the subject as a responder, a non-responder, a relapser or a non-relapser, based on a measure of one or more of (i)-(vii).

[1202] In some embodiments of any of the methods disclosed herein, a responder (e.g., a complete responder) has, or is identified as having, a greater level or activity of one, two, or more (all) of GZMK, PPF1BP2, or naïve T cells as compared to a non-responder.

[1203] In some embodiments of any of the methods disclosed herein, a non-responder has, or is identified as having, a greater level or activity of one, two, three, four, five, six, seven, or more (e.g., all) of IL22, IL-2RA, IL-21, IRF8, IL8, CCL17, CCL22, effector T cells, or regulatory T cells, as compared to a responder.

[1204] In an embodiment, a relapser is a patient having, or who is identified as having, an increased level of expression of one or more of (e.g., 2, 3, 4, or all of) the following genes, compared to non relapsers: MIR199A1, MIR1203, uc021ovp, ITM2C, and HLA-DQB1 and/or a decreased levels of expression of one or more of (e.g., 2, 3, 4, 5, 6, 7, 8, 9, 10, 11, or all of) the following genes, compared to non relapsers: PPIAL4D, TTTY10, TXLNG2P, MIR4650-1, KDM5D, USP9Y, PRKY, RPS4Y2, RPS4Y1, NCRNA00185, SULT1E1, and EIF1AY.

[1205] In some embodiments of any of the methods disclosed herein, a complete responder has, or is identified as having, a greater, e.g., a statistically significant greater, percentage of CD8+ T cells compared to a reference value, e.g., a non-responder percentage of CD8+ T cells.

[1206] In some embodiments of any of the methods disclosed herein, a complete responder has, or is identified as having, a greater percentage of CD27+CD45RO− immune effector cells, e.g., in the CD8+ population, compared to a reference value, e.g., a non-responder number of CD27+CD45RO− immune effector cells.

[1207] In some embodiments of any of the methods disclosed herein, a complete responder or a partial responder has, or is identified as having, a greater, e.g., a statistically significant greater, percentage of CD4+ T cells compared to a reference value, e.g., a non-responder percentage of CD4+ T cells.

[1208] In some embodiments of any of the methods disclosed herein, a complete responder has, or is identified as having, a greater percentage of one, two, three, or more (e.g., all) of resting T_{EFF} cells, resting T_{REG} cells, younger T cells (e.g., younger CD4 or CD8 cells, or gamma/delta T cells), or early memory T cells, or a combination thereof, compared to a reference value, e.g., a non-responder number of resting T_{EFF} cells, resting T_{REG} cells, younger T cells (e.g., younger CD4 or CD8 cells), or early memory T cells.

[1209] In some embodiments of any of the methods disclosed herein, a non-responder has, or is identified as having, a greater percentage of one, two, three, or more (e.g., all) of activated T_{EFF} cells, activated T_{REG} cells, older T cells (e.g., older CD4 or CD8 cells), or late memory T cells, or a combination thereof, compared to a reference value, e.g., a responder number of activated T_{EFF} cells, activated T_{REG} cells, older T cells (e.g., older CD4 or CD8 cells), or late memory T cells.

[1210] In some embodiments of any of the methods disclosed herein, a non-responder has, or is identified as having, a greater percentage of an immune cell exhaustion marker, e.g., one, two or more immune checkpoint inhibitors (e.g., PD-1, PD-L1, TIM-3 and/or LAG-3). In one embodiment, a non-responder has, or is identified as having, a greater percentage of PD-1, PD-L1, or LAG-3 expressing immune effector cells (e.g., CD4+ T cells and/or CD8+ T cells) (e.g., CAR-expressing CD4+ cells and/or CD8+ T cells) compared to the percentage of PD-1 or LAG-3 expressing immune effector cells from a responder.

[1211] In one embodiment, a non-responder has, or is identified as having, a greater percentage of immune cells having an exhausted phenotype, e.g., immune cells that co-express at least two exhaustion markers, e.g., co-expresses PD-1, PD-L1 and/or TIM-3. In other embodiments, a non-responder has, or is identified as having, a greater percentage of immune cells having an exhausted phenotype, e.g., immune cells that co-express at least two exhaustion markers, e.g., co-expresses PD-1 and LAG-3.

[1212] In some embodiments of any of the methods disclosed herein, a non-responder has, or is identified as having, a greater percentage of PD-1/PD-L1+/LAG-3+ cells in the CAR-expressing cell population compared to a responder (e.g., a complete responder) to the CAR-expressing cell therapy.

[1213] In some embodiments of any of the methods disclosed herein, a partial responder has, or is identified as having, a higher percentages of PD-1/PD-L1+/LAG-3+ cells, than a responder, in the CAR-expressing cell population.

[1214] In some embodiments of any of the methods disclosed herein, a non-responder has, or is identified as having, an exhausted phenotype of PD1/PD-L1+ CAR+ and co-expression of LAG3 in the CAR-expressing cell population.

[1215] In some embodiments of any of the methods disclosed herein, a non-responder has, or is identified as having, a greater percentage of PD-1/PD-L1+/TIM-3+ cells in the CAR-expressing cell population compared to the responder (e.g., a complete responder).

[1216] In some embodiments of any of the methods disclosed herein, a partial responders has, or is identified as having, a higher percentage of PD-1/PD-L1+/TIM-3+ cells, than responders, in the CAR-expressing cell population.

[1217] In some embodiments of any of the methods disclosed herein, the presence of CD8+CD27+CD45RO− T cells in an apheresis sample is a positive predictor of the subject response to a CAR-expressing cell therapy.

[1218] In some embodiments of any of the methods disclosed herein, a high percentage of PD1+ CAR+ and LAG3+ or TIM3+ T cells in an apheresis sample is a poor prognostic predictor of the subject response to a CAR-expressing cell therapy.

[1219] In some embodiments of any of the methods disclosed herein, the responder (e.g., the complete or partial responder) has one, two, three or more (or all) of the following profile:
[1220] (i) has a greater number of CD27+ immune effector cells compared to a reference value, e.g., a non-responder number of CD27+ immune effector cells;
[1221] (ii) has a greater number of CD8+ T cells compared to a reference value, e.g., a non-responder number of CD8+ T cells;
[1222] (iii) has a lower number of immune cells expressing one or more checkpoint inhibitors, e.g., a checkpoint inhibitor chosen from PD-1, PD-L1, LAG-3, TIM-3, or KLRG-1, or a combination, compared to a reference value, e.g., a non-responder number of cells expressing one or more checkpoint inhibitors; or
[1223] (iv) has a greater number of one, two, three, four or more (all) of resting TEFF cells, resting T_{REG} cells, naïve CD4 cells, unstimulated memory cells or early memory T cells, or a combination thereof, compared to a reference value, e.g., a non-responder number of resting T_{EFF} cells, resting T_{REG} cells, naïve CD4 cells, unstimulated memory cells or early memory T cells.

[1224] In some embodiments of any of the methods disclosed herein, the cytokine level or activity of (vi) is chosen from one, two, three, four, five, six, seven, eight, or more (or all) of cytokine CCL20/MIP3a, IL17A, IL6, GM-CSF, IFNγ, IL10, IL13, IL2, IL21, IL4, IL5, IL9 or TNFα, or a combination thereof. The cytokine can be chosen from one, two, three, four or more (all) of IL-17a, CCL20, IL2, IL6, or TNFa. In one embodiment, an increased level or activity of a cytokine is chosen from one or both of IL-17a and CCL20, is indicative of increased responsiveness or decreased relapse.

[1225] In some embodiments of any of the methods disclosed herein, a transduction efficiency of 15% or higher in (vii) is indicative of increased responsiveness or decreased relapse.

[1226] In some embodiments of any of the methods disclosed herein, a transduction efficiency of less than 15% in (vii) is indicative of decreased responsiveness or increased relapse.

[1227] In embodiments, the responder, a non-responder, a relapser or a non-relapser identified by the methods herein can be further evaluated according to clinical criteria. For example, a complete responder has, or is identified as, a subject having a disease, e.g., a cancer, who exhibits a complete response, e.g., a complete remission, to a treatment. A complete response may be identified, e.g., using the NCCN Guidelines® (which are incorporated by reference herein in their entireties), as described herein. A partial responder has, or is identified as, a subject having a disease, e.g., a cancer, who exhibits a partial response, e.g., a partial remission, to a treatment. A partial response may be identified, e.g., using the NCCN Guidelines®, as described herein. A non-responder has, or is identified as, a subject having a disease, e.g., a cancer, who does not exhibit a response to a treatment, e.g., the patient has stable disease or progressive disease. A non-responder may be identified, e.g., using the NCCN Guidelines®, as described herein.

[1228] Alternatively, or in combination with the methods disclosed herein, responsive to said value, performing one, two, three, four or more of:
[1229] administering e.g., to a responder or a non-relapser, a CAR-expressing cell therapy;
[1230] administered an altered dosing of a CAR-expressing cell therapy;
[1231] altering the schedule or time course of a CAR-expressing cell therapy;
[1232] administering, e.g., to a non-responder or a partial responder, an additional agent in combination with a CAR-expressing cell therapy, e.g., a checkpoint inhibitor, e.g., a checkpoint inhibitor described herein;
[1233] administering to a non-responder or partial responder a therapy that increases the number of younger T cells in the subject prior to treatment with a CAR-expressing cell therapy;
[1234] modifying a manufacturing process of a CAR-expressing cell therapy, e.g., enriching for younger T cells prior to introducing a nucleic acid encoding a CAR, or increasing the transduction efficiency, e.g., for a subject identified as a non-responder or a partial responder;
[1235] administering an alternative therapy, e.g., for a non-responder or partial responder or relapser; or if the subject is, or is identified as, a non-responder or a relapser, decreasing the T_{REG} cell population and/or T_{REG} gene signature, e.g., by one or more of CD25 depletion, administration of cyclophosphamide, anti-GITR antibody, or a combination thereof.

[1236] In certain embodiments, the subject is pre-treated with an anti-GITR antibody. In certain embodiment, the subject is treated with an anti-GITR antibody prior to infusion or re-infusion.

[1237] In some embodiments of the methods described herein, imaging with FDG-PET/CT (PET/CT) is performed on a subject who has been treated with a CAR therapy. This measurement can predict response to the therapy. For instance, in embodiments, metabolically active tumor volume (MTV) and/or [11F]-2-fluoro-2-deoxy-D-glucose (FDG) uptake are measured. In embodiments, a decrease in MTV is indicative of response, e.g., CR (complete response) or PR (partial response), e.g., a post-treatment MTV value of about 0 is indicative of CR, while an increase in MTV is indicative of PD (progressive disease). In embodiments, a decrease in FDG uptake is indicative of response, e.g., CR or PR, while an increase in FDG uptake is indicative of PD. In embodiments, the imaging is performed after administration of the CAR therapy, e.g., about 1 week, 2 weeks, 3 weeks, 4 weeks, 1 month, 2 months, 3 months, 4 months, 5 months, or 6 months after administration of the CAR therapy. In embodiments, the imaging is performed on a subject who does not have symptoms of CRS (cytokine release syndrome), e.g., a patient who suffered from CRS and whose symptoms resolved prior to imaging. In embodiments, the imaging is performed on a subject who has symptoms of CRS. In embodiments, imaging is performed prior to CAR therapy, and the pre-therapy image is compared to a post-therapy image. In embodiments, the subject has a cancer, e.g., lymphoma, e.g., diffuse large B-cell lymphoma (DLBCL) or follicular lymphoma (FL). In some embodiments, the CAR therapy comprises a CAR19-expressing cell, e.g., CTL019. In some embodiments, the CAR therapy comprises a CAR therapy described herein, e.g., a CAR20-expressing cell, a CAR22-expressing cell, or a CAR19-expressing cell, optionally in combination with a B-cell therapy.

### Personalized Medicine (Theranostics)

[1238] CD19 Characteristics, e.g. Mutations

[1239] Without wishing to be bound by theory, some cancer patients show an initial response to a CD19 inhibitor such as a CD19 CAR-expressing cell, and then relapse. In some embodiments, the relapse is caused (at least in part) by a frameshift and/or premature stop codon in CD19 in the cancer cells, or other change in the expression (including expression levels) of CD19 which reduces the ability of a CD19 CAR-expressing cell to target the cancer cells. Such a mutation can reduce the effectiveness of the CD19 therapy and contribute to the patient's relapse. Accordingly, in some embodiments, it can be beneficial when a CD19 therapy is supplemented or replaced with a therapy directed to a second, different target, e.g., a target expressed in B-cells, e.g., one or more of CD10, CD20, CD22, CD34, CD123, FLT-3, or ROR1. Various exemplary combination therapies of this type are disclosed herein.

[1240] This application discloses, among other things, methods for treating a subject having cancer comprising one or more of: (1) determining if a subject has a difference, e.g., statistically significant difference, in a characteristic of CD19 relative to a reference characteristic, and (2) if there is a difference between the determined characteristic and reference characteristic, administering to the subject a therapeutically effective dose of a CAR therapy, e.g., CART, thereby treating the subject. The patient may be, e.g., a patient who has relapsed after treatment with a CD19 inhibitor, e.g., a CD19 CAR expressing cell. The patient may be a patient who has received or is receiving a CD19 CAR therapy and is at risk of relapse. The patient may be a non-responder to a CD19 CAR therapy.

[1241] The characteristic can be, e.g., a CD19 sequence, e.g., protein or nucleic acid sequence. The sequence can be determined, e.g., as described in the Examples, by high throughput nucleic acid sequencing, or by mass spectrometry of proteins. As described in the Example herein, a patient may relapse after CD19 CART therapy because of mutations in CD19, e.g., in exon 2 of CD19, e.g., a mutation that causes a frameshift and a premature stop codon in CD19. In embodiments, the insertion or deletion does not cause one or both of a frameshift and a premature stop codon. The mutation may be, e.g., an insertion, a deletion, a substitution, a translocation, or a combination of any of the foregoing. The insertion, deletion, or substitution may involve, e.g., at least 1, 2, 3, 4, 5, 10, 15, 20, 20, or 50 nucleotides. The insertion, deletion, or substitution may involve, e.g., at most 2, 3, 4, 5, 10, 15, 20, 20, 50, or 100 nucleotides. In some cases, a population of cells will comprise more than one mutation. In such cases, the mutations can be in overlapping or non-overlapping sub-populations of cells.

[1242] In some cases a patient is identified as having a CD19 characteristic that reduces CD19's ability to engage with a CD19 inhibitor such as a CD19 CAR expressing cell. Such a characteristic may be, e.g., a frameshift mutation, a premature stop codon, an alteration in nucleic acid sequence or an alteration in the structure of the primary mRNA transcript. The characteristic may be, e.g., a departure from normal production of CD19 that occurs earlier than splicing. The characteristic may be, e.g., a characteristic other than exon skipping. Such patients may be treated with an inhibitor of another target, e.g., a B-cell inhibitor, for example a CAR expressing cell directed against another epitope, e.g., an epitope within one or more of CD10, CD20, CD22, CD34, CD123, FLT-3, or ROR1.

[1243] In some cases, a patient is identified as having a CD19 characteristic that reduces CD19's ability to engage with a CD19 inhibitor, such as a CD19 CAR expressing cell, but does not reduce or abrogate CD19's ability to engage with a second CD19 inhibitor, such as a CD19 inhibitor that binds to a different region on CD19. Such a characteristic may be, e.g., a mutation that does not cause one or both of a frameshift mutation or a premature stop codon. Such a characteristic may be, e.g., an alteration in nucleic acid sequence or an alteration in the structure of the primary mRNA transcript, a departure from normal production of CD19 that occurs earlier than splicing, or a characteristic other than exon skipping. Such patients may be treated with an inhibitor of CD19, e.g., a B-cell inhibitor directed against an intact region of CD19, e.g., a wild-type portion of CD19. For instance, if a mutation is present in exon 2, the second CD19 inhibitor may bind to an exon other than exon 2, or a part of exon 2 that lacks the mutation. The second CD19 inhibitor may be, e.g., a CD19 inhibitor described herein.

[1244] T_{EFF} AND T_{REG} Signatures

[1245] Methods herein can include steps of determining a T_{REG} signature or determining the levels of T_{EFF} cells or T_{REG} cells, e.g., in a patient or in a population of cells e.g., immune cells. Methods herein can also include steps of reducing the level of T_{REG} cells, or decreasing a T_{REG} signature, in a patient or in a population of cells. In some embodiments, a T_{EFF} is a cell with upregulated expression of one or more (e.g., at least 10, 20, 30, 40, 50, 60, 70, 80, or all) of the following genes: AIM2, ALAS1, B4GALT5, BATF, C3orf26, C4orf43, CCL3, CCL4, CCT3, CCT7, CD40LG, CHAC2, CSF2, CTNNA1, EBNA1BP2, EDARADD, EEF1E1, EIF2B3, EIF2S1, FABP5, FAM40B, FKBP4, FOSL1, GFOD1, GLRX2, HSPD1, HSPE1, IFNG, IL15RA, IL21, IL2RA, IL3, KCNK5, KIAA0020, LARP4, LRP8, LTA, MANF, MIR1182, MIR155, MIR155HG, MTCH2, MYOF, NDUFAF1, NLN, NME1, NME1-NME2, OTUD7B, PAM, PDIA6, PEA15, PFKM, PGAM1, PGAM4, PPIL1, PRDX4, PRSS23, PSMD1, PSMD11, PSMD14, PTRH2, PUS7, RBBP8, RPF2, RPP25, SFXN1, SLC27A2, SLC39A14, SLC43A3, SORD, SPR, SRXN1, STIP1, STT3A, TBX21, TMCC2, TMEM165, TNFRSF9, TXN, TXNDC5, UCK2, VDR, WDR12, YWHAG, and ZDHHC16. In some embodiments, a T_{REG} cell is a cell with upregulated expression of one or more (e.g., at least 10, 20, 30, 40, 50, 60, 70, or all) of the following genes: AIM2, ALAS1, BATF, C5orf32, CCL17, CD40LG, CHAC2, CSF1, CTSL1, EBNA1BP2, EDARADD, EMP1, EPAS1, FABP5, FAM40B, FKBP4, FOSL1, GCLM, GK, GPR56, HMOX1, HSPD1, HSPE1, IKBIP, IL10, IL13, IL15RA, IL1RN, IL2RA, IL3, IL4, IL5, IL9, KCNK5, LTA, MANF, MIR1182, MIR155, MIR155HG, MYOF, NDUFAF1, NLN, NME1, NME1-NME2, PANX2, PDIA6, PGAM4, PPIL1, PPPDE2, PRDX4, PRKAR1B, PSMD1, PSMD11, PUS7, RBBP8, SLC27A2, SLC39A14, SLC43A3, SRXN1, STIP1, STT3A, TBX21, TNFRSF11A, TNFRSF1B, TNFRSF8, TNFRSF9, TXN, UCK2, VDR, VTRNA1-3, WDR12, YWHAG, ZDHHC16, and ZNF282. The upregulated expression may be, e.g., measured 16 hours after stimulation. The upregulated expression may be determined, e.g., by measuring RNA levels for the indicated genes.

### Pharmaceutical Compositions and Treatments

[1246] Pharmaceutical compositions of the present invention may comprise, in some aspects, a CAR-expressing cell, e.g., a plurality of CAR-expressing cells, as described herein, in combination with one or more pharmaceutically or physiologically acceptable carriers, diluents or excipients. Such compositions may comprise buffers such as neutral buffered saline, phosphate buffered saline and the like; carbohydrates such as glucose, mannose, sucrose or dextrans, mannitol; proteins; polypeptides or amino acids such as glycine; antioxidants; chelating agents such as EDTA or glutathione; adjuvants (e.g., aluminum hydroxide); and preservatives. Compositions of the present invention are in one aspect formulated for intravenous administration.

[1247] Pharmaceutical compositions of the present invention may be administered in a manner appropriate to the disease to be treated (or prevented). The quantity and frequency of administration will be determined by such factors as the condition of the patient, and the type and severity of the patient's disease, although appropriate dosages may be determined by clinical trials.

[1248] In one embodiment, the pharmaceutical composition is substantially free of, e.g., there are no detectable levels of a contaminant, e.g., selected from the group consisting of endotoxin, mycoplasma, replication competent lentivirus (RCL), p24, VSV-G nucleic acid, HIV gag, residual anti-CD3/anti-CD28 coated beads, mouse antibodies, pooled human serum, bovine serum albumin, bovine serum, culture media components, vector packaging cell or plasmid components, a bacterium and a fungus. In one embodiment, the bacterium is at least one selected from the group consisting of Alcaligenes faecalis, Candida albicans, Escherichia coli, Haemophilus influenza, Neisseria meningitides, Pseudomonas aeruginosa, Staphylococcus aureus, Streptococcus pneumonia, and Streptococcus pyogenes group A.

[1249] When “an immunologically effective amount,” “an anti-tumor effective amount,” “a tumor-inhibiting effective amount,” or “therapeutic amount” is indicated, the precise amount of the compositions of the present invention to be administered can be determined by a physician with consideration of individual differences in age, weight, tumor size, extent of infection or metastasis, and condition of the patient (subject). In some embodiments, a pharmaceutical composition comprising the cells, e.g., T cells described herein may be administered at a dosage of 10⁴ to 10⁹ cells/kg body weight, in some instances 10⁵ to 10⁶ cells/kg body weight, including all integer values within those ranges. In some embodiments, the cells, e.g., T cells described herein may be administered at 3×10⁴, 1×10⁶, 3×10⁶, or 1×10⁷ cells/kg body weight. The cell compositions may also be administered multiple times at these dosages. The cells can be administered by using infusion techniques that are commonly known in immunotherapy (see, e.g., Rosenberg et al., New Eng. J. of Med. 319:1676, 1988).

[1250] In some embodiments, a dose of CAR cells (e.g., CD10, CD19, CD20, CD22, CD34, CD123, FLT-3, or ROR1 CAR cells) comprises about 1×10⁵, 2×10⁵, 5×10⁵, 1×10⁶, 1.1×10⁶, 2×10⁶, 3.6×10⁶, 5×10⁶, 1×10⁷, 1.8×10⁷, 2×10⁷, 5×10⁷, 1×10⁸, 2×10⁸, or 5×10⁸ cells/kg. In some embodiments, a dose of CAR cells (e.g., CD10, CD19, CD20, CD22, CD34, CD123, FLT-3, or ROR1 CAR cells) comprises at least about 1×10⁵, 2×10⁵, 5×10⁵, 1×10⁶, 1.1×10⁶, 2×10⁶, 3.6×10⁶, 5×10⁶, 1×10⁷, 1.8×10⁷, 2×10⁷, 5×10⁷, 1×10⁸, 2×10⁸, or 5×10⁸ cells/kg. In some embodiments, a dose of CAR cells (e.g., CD10, CD19, CD20, CD22, CD34, CD123, FLT-3, or ROR1 CAR cells) comprises up to about 1×10⁵, 2×10⁵, 5×10⁵, 1×10⁶, 1.1×10⁶, 2×10⁶, 3.6×10⁶, 5×10⁶, 1×10⁷, 1.8×10⁷, 2×10⁷, 5×10⁷, 1×10⁸, 2×10⁸, or 5×10⁸ cells/kg. In some embodiments, a dose of CAR cells (e.g., CD10, CD19, CD20, CD22, CD34, CD123, FLT-3, or ROR1 CAR cells) comprises about 1.1×10⁶-1.8×10⁷ cells/kg or about 8×10⁵-1.5×10⁶ cells/kg. In some embodiments, a dose of CAR cells (e.g., CD10, CD19, CD20, CD22, CD34, CD123, FLT-3, or ROR1 CAR cells) comprises about 1×10⁷, 2×10⁷, 5×10⁷, 1×10⁸, 2×10⁸, 5×10⁸, 1×10⁹, 2×10⁹, or 5×10⁹ cells. In some embodiments, a dose of CAR cells (e.g., CD10, CD19, CD20, CD22, CD34, CD123, FLT-3, or ROR1 CAR cells) comprises at least about 1×10⁷, 2×10⁷, 5×10⁷, 1×10⁸, 2×10⁸, 5×10⁸, 1×10⁹, 2×10⁹, or 5×10⁹ cells. In some embodiments, a dose of CAR cells (e.g., CD10, CD19, CD20, CD22, CD34, CD123, FLT-3, or ROR1 CAR cells) comprises up to about 1×10⁷, 2×10⁷, 5×10⁷, 1×10⁸, 2×10⁸, 5×10⁸, 1×10⁹, 2×10⁹, or 5×10⁹ cells.

[1251] In certain aspects, it may be desired to administer activated cells, e.g., T cells or NK cells, to a subject and then subsequently redraw blood (or have an apheresis performed), activate the cells therefrom according to the present invention, and reinfuse the patient with these activated and expanded cells. This process can be carried out multiple times every few weeks. In certain aspects, cells, e.g., T cells or NK cells, can be activated from blood draws of from 10 cc to 400 cc. In certain aspects, cells, e.g., T cells or NK cells, are activated from blood draws of 20 cc, 30 cc, 40 cc, 50 cc, 60 cc, 70 cc, 80 cc, 90 cc, or 100 cc.

[1252] The administration of the subject compositions may be carried out in any convenient manner, including by aerosol inhalation, injection, ingestion, transfusion, implantation or transplantation. The compositions described herein may be administered to a patient trans arterially, subcutaneously, intradermally, intratumorally, intranodally, intramedullary, intramuscularly, by intravenous (i.v.) injection, or intraperitoneally. In one aspect, the cell compositions, e.g., T cell or NK cell compositions, of the present invention are administered to a patient by intradermal or subcutaneous injection. In one aspect, the cell compositions e.g., T cell or NK cell compositions, of the present invention are administered by i.v. injection. The compositions of cells e.g., T cell or NK cell compositions, may be injected directly into a tumor, lymph node, or site of infection.

[1253] In a particular exemplary aspect, subjects may undergo leukapheresis, wherein leukocytes are collected, enriched, or depleted ex vivo to select and/or isolate the cells of interest, e.g., T cells. These cell isolates, e.g., T cell or NK cell isolates, may be expanded by methods known in the art and treated such that one or more CAR constructs of the invention may be introduced, thereby creating a CAR-expressing cell, e.g., CAR T cell of the invention. Subjects in need thereof may subsequently undergo standard treatment with high dose chemotherapy followed by peripheral blood stem cell transplantation. In certain aspects, following or concurrent with the transplant, subjects receive an infusion of the expanded CAR-expressing cells of the present invention. In an additional aspect, expanded cells are administered before or following surgery.

[1254] The dosage of the above treatments to be administered to a patient will vary with the precise nature of the condition being treated and the recipient of the treatment. The scaling of dosages for human administration can be performed according to art-accepted practices. The dose for a therapeutic, e.g., an antibody, e.g., CAMPATH, for example, may be, e.g., in the range 1 to about 100 mg for an adult patient, e.g., administered daily for a period between 1 and 30 days. A suitable daily dose is 1 to 10 mg per day although in some instances larger doses of up to 40 mg per day may be used (described in U.S. Pat. No. 6,120,766).

[1255] In one embodiment, the CAR is introduced into cells, e.g., T cells or NK cells, e.g., using in vitro transcription, and the subject (e.g., human) receives an initial administration of CAR-expressing cells, e.g., CAR T cells of the invention, and one or more subsequent administrations of the CAR-expressing cells, e.g., CAR T cells of the invention, wherein the one or more subsequent administrations are administered less than 15 days, e.g., 14, 13, 12, 11, 10, 9, 8, 7, 6, 5, 4, 3, or 2 days after the previous administration. In one embodiment, more than one administration of the CAR-expressing cells, e.g., CAR T cells of the invention are administered to the subject (e.g., human) per week, e.g., 2, 3, or 4 administrations of the CAR-expressing cells, e.g., CAR T cells of the invention are administered per week. In one embodiment, the subject (e.g., human subject) receives more than one administration of the CAR-expressing cells, e.g., CAR T cells per week (e.g., 2, 3 or 4 administrations per week) (also referred to herein as a cycle), followed by a week of no CAR-expressing cells, e.g., CAR T cells administrations, and then one or more additional administration of the CAR-expressing cells, e.g., CAR T cells (e.g., more than one administration of the CAR-expressing cells, e.g., CAR T cells per week) is administered to the subject. In another embodiment, the subject (e.g., human subject) receives more than one cycle of CAR-expressing cells, e.g., CART cells, and the time between each cycle is less than 10, 9, 8, 7, 6, 5, 4, or 3 days. In one embodiment, the CAR-expressing cells, e.g., CAR T cells are administered every other day for 3 administrations per week. In one embodiment, the CAR-expressing cells, e.g., CAR T cells of the invention are administered for at least two, three, four, five, six, seven, eight or more weeks.

[1256] In some embodiments, subjects may be adult subjects (i.e., 18 years of age and older). In certain embodiments, subjects may be between 1 and 30 years of age. In some embodiments, the subjects are 16 years of age or older. In certain embodiments, the subjects are between 16 and 30 years of age. In some embodiments, the subjects are child subjects (i.e., between 1 and 18 years of age).

[1257] In one aspect, CAR-expressing cells, e.g., CARTs are generated using lentiviral viral vectors, such as lentivirus. CAR-expressing cells, e.g., CARTs generated that way will have stable CAR expression.

[1258] In one aspect, CAR-expressing cells, e.g., CARTs, are generated using a viral vector such as a gammaretroviral vector, e.g., a gammaretroviral vector described herein. CARTs generated using these vectors can have stable CAR expression.

[1259] In one aspect, CAR-expressing cells, e.g., CARTs transiently express CAR vectors for 4, 5, 6, 7, 8, 9, 10, 11, 12, 13, 14, 15 days after transduction. Transient expression of CARs can be effected by RNA CAR vector delivery. In one aspect, the CAR RNA is transduced into the cell, e.g., NK cell or T cell, by electroporation.

[1260] A potential issue that can arise in patients being treated using transiently expressing CAR T cells (particularly with murine scFv bearing CARTs) is anaphylaxis after multiple treatments.

[1261] Without being bound by this theory, it is believed that such an anaphylactic response might be caused by a patient developing humoral anti-CAR response, i.e., anti-CAR antibodies having an anti-IgE isotype. It is thought that a patient's antibody producing cells undergo a class switch from IgG isotype (that does not cause anaphylaxis) to IgE isotype when there is a ten to fourteen day break in exposure to antigen.

[1262] If a patient is at high risk of generating an anti-CAR antibody response during the course of transient CAR therapy (such as those generated by RNA transductions), CART infusion breaks should not last more than ten to fourteen days.

### CD19 Antibodies and CARs

### Humanization of Murine Anti-CD19 Antibody

[1263] Humanization of murine CD19 antibody is desired for the clinical setting, where the mouse-specific residues may induce a human-anti-mouse antigen (HAMA) response in patients who receive CART19 treatment, i.e., treatment with T cells transduced with the CAR19 construct. The production, characterization, and efficacy of humanized CD19 CAR sequences is described in International Application WO2014/153270 which is herein incorporated by reference in its entirety, including Examples 1-5 (p. 115-159), for instance Tables 3, 4, and 5 (p. 125-147).

### CAR Constructs, e.g., CD19 CAR Constructs

[1264] Of the CD19 CAR constructs described in International Application WO2014/153270, certain sequences are reproduced herein. It is understood that the sequences in this section can also be used in the context of other CARs, e.g., CD10 CARs, CD20 CARs, CD22 CARs, CD34 CARs, CD123 CARs, FLT-3 CARs, ROR1 CARs, CD79b CARs, CD179b CARs, or CD79a CARs.

[1265] The sequences of the humanized scFv fragments (SEQ ID NOS: 1-12) are provided below in Table 2. Full CAR constructs were generated using SEQ ID NOs: 1-12 with additional sequences, SEQ ID NOs: 13-17, shown below, to generate full CAR constructs with SEQ ID NOs: 31-42.

leader (amino acid sequence)
(SEQ ID NO: 13)
MALPVTALLLPLALLLHAARP
leader (nucleic acid sequence)
(SEQ ID NO: 54)
ATGGCCCTGCCTGTGACAGCCCTGCTGCTGCCTCTGGCTCTGCTGCTGCA
TGCCGCTAGACCC
CD8 hinge (amino acid sequence)
(SEQ ID NO: 14)
TTTPAPRPPTPAPTIASQPLSLRPEACRPAAGGAVHTRGLDFACD
CD8 hinge (nucleic acid sequence)
(SEQ ID NO: 55)
ACCACGACGCCAGCGCCGCGACCACCAACACCGGCGCCCACCATCGCGTC
GCAGCCCCTGTCCCTGCGCCCAGAGGCGTGCCGGCCAGCGGCGGGGGGCG
CAGTGCACACGAGGGGGCTGGACTTCGCCTGTGAT
CD8 transmembrane (amino acid sequence)
(SEQ ID NO: 15)
IYIWAPLAGTCGVLLLSLVITLYC
transmembrane (nucleic acid sequence)
(SEQ ID NO: 56)
ATCTACATCTGGGCGCCCTTGGCCGGGACTTGTGGGGTCCTTCTCCTGTC
ACTGGTTATCACCCTTTACTGC
4-1BB Intracellular domain (amino acid sequence)
(SEQ ID NO: 16)
KRGRKKLLYIFKQPFMRPVQTTQEEDGCSCRFPEEEEGGCEL
4-1BB Intracellular domain (nucleic acid sequence)
(SEQ ID NO: 60)
AAACGGGGCAGAAAGAAACTCCTGTATATATTCAAACAACCATTTATGAG
ACCAGTACAAACTACTCAAGAGGAAGATGGCTGTAGCTGCCGATTTCCAG
AAGAAGAAGAAGGAGGATGTGAACTG
CD3 zeta domain (amino acid sequence)
(SEQ ID NO: 17)
RVKFSRSADAPAYKQGQNQLYNELNLGRREEYDVLDKRRGRDPEMGGKPR
RKNPQEGLYNELQKDKMAEAYSEIGMKGERRRGKGHDGLYQGLSTATKDT
YDALHMQALPPR
CD3 zeta (nucleic acid sequence)
(SEQ ID NO: 101)
AGAGTGAAGTTCAGCAGGAGCGCAGACGCCCCCGCGTACAAGCAGGGCCA
GAACCAGCTCTATAACGAGCTCAATCTAGGACGAAGAGAGGAGTACGATG
TTTTGGACAAGAGACGTGGCCGGGACCCTGAGATGGGGGGAAAGCCGAGA
AGGAAGAACCCTCAGGAAGGCCTGTACAATGAACTGCAGAAAGATAAGAT
GGCGGAGGCCTACAGTGAGATTGGGATGAAAGGCGAGCGCCGGAGGGGCA
AGGGGCACGATGGCCTTTACCAGGGTCTCAGTACAGCCACCAAGGACACC
TACGACGCCCTTCACATGCAGGCCCTGCCCCCTCGC
CD3 zeta domain (amino acid sequence; NCBI
Reference Sequence NM_000734.3)
(SEQ ID NO: 43)
RVKFSRSADAPAYQQGQNQLYNELNLGRREEYDVLDKRRGRDPEMGGKPR
RKNPQEGLYNELQKDKMAEAYSEIGMKGERRRGKGHDGLYQGLSTATKDT
YDALHMQALPPR
CD3 zeta (nucleic acid sequence; NCBI Reference
Sequence NM_000734.3);
(SEQ ID NO: 44)
AGAGTGAAGTTCAGCAGGAGCGCAGACGCCCCCGCGTACCAGCAGGGCCA
GAACCAGCTCTATAACGAGCTCAATCTAGGACGAAGAGAGGAGTACGATG
TTTTGGACAAGAGACGTGGCCGGGACCCTGAGATGGGGGGAAAGCCGAGA
AGGAAGAACCCTCAGGAAGGCCTGTACAATGAACTGCAGAAAGATAAGAT
GGCGGAGGCCTACAGTGAGATTGGGATGAAAGGCGAGCGCCGGAGGGGCA
AGGGGCACGATGGCCTTTACCAGGGTCTCAGTACAGCCACCAAGGACACC
TACGACGCCCTTCACATGCAGGCCCTGCCCCCTCGC
CD28 domain
(amino acid sequence, SEQ ID NO: 1317)
RSKRSRLLHSDYMNMTPRRPGPTRKHYQPYAPPRDFAAYRS
CD28 domain
(nucleotide sequence, SEQ ID NO: 1318)
AGGAGTAAGAGGAGCAGGCTCCTGCACAGTGACTACATGAACATGACTCC
CCGCCGCCCCGGGCCCACCCGCAAGCATTACCAGCCCTATGCCCCACCAC
GCGACTTCGCAGCCTATCGCTCC
Wild-type ICOS domain
(amino acid sequence, SEQ ID NO: 1319)
TKKKYSSSVHDPNGEYMFMRAVNTAKKSRLTDVTL
Wild-type ICOS domain
(nucleotide sequence, SEQ ID NO: 1320)
ACAAAAAAGAAGTATTCATCCAGTGTGCACGACCCTAACGGTGAATACAT
GTTCATGAGAGCAGTGAACACAGCCAAAAAATCCAGACTCACAGATGTG
ACCCTA
Y to F mutant ICOS domain
(amino acid sequence, SEQ ID NO: 1321)
TKKKYSSSVHDPNGEFMFMRAVNTAKKSRLTDVTL
IgG4 Hinge (amino acid sequence)
(SEQ ID NO: 102)
ESKYGPPCPPCPAPEFLGGPSVFLFPPKPKDTLMISRTPEVTCVVVDVSQ
EDPEVQFNWYVDGVEVHNAKTKPREEQFNSTYRVVSVLTVLHQDWLNGKE
YKCKVSNKGLPSSIEKTISKAKGQPREPQVYTLPPSQEEMTKNQVSLTCL
VKGFYPSDIAVEWESNGQPENNYKTTPPVLDSDGSFFLYSRLTVDKSRWQ
EGNVFSCSVMHEALHNHYTQKSLSLSLGKM
IgG4 Hinge (nucleotide sequence)
(SEQ ID NO: 103)
GAGAGCAAGTACGGCCCTCCCTGCCCCCCTTGCCCTGCCCCCGAGTTCCT
GGGCGGACCCAGCGTGTTCCTGTTCCCCCCCAAGCCCAAGGACACCCTGA
TGATCAGCCGGACCCCCGAGGTGACCTGTGTGGTGGTGGACGTGTCCCAG
GAGGACCCCGAGGTCCAGTTCAACTGGTACGTGGACGGCGTGGAGGTGCA
CAACGCCAAGACCAAGCCCCGGGAGGAGCAGTTCAATAGCACCTACCGGG
TGGTGTCCGTGCTGACCGTGCTGCACCAGGACTGGCTGAACGGCAAGGAA
TACAAGTGTAAGGTGTCCAACAAGGGCCTGCCCAGCAGCATCGAGAAAAC
CATCAGCAAGGCCAAGGGCCAGCCTCGGGAGCCCCAGGTGTACACCCTGC
CCCCTAGCCAAGAGGAGATGACCAAGAACCAGGTGTCCCTGACCTGCCTG
GTGAAGGGCTTCTACCCCAGCGACATCGCCGTGGAGTGGGAGAGCAACGG
CCAGCCCGAGAACAACTACAAGACCACCCCCCCTGTGCTGGACAGCGACG
GCAGCTTCTTCCTGTACAGCCGGCTGACCGTGGACAAGAGCCGGTGGCAG
GAGGGCAACGTCTTTAGCTGCTCCGTGATGCACGAGGCCCTGCACAACCA
CTACACCCAGAAGAGCCTGAGCCTGTCCCTGGGCAAGATG

[1266] These clones all contained a Q/K residue change in the signal domain of the co-stimulatory domain derived from 4-1BB.

TABLE 2
Humanized CD19 CAR Constructs

| | | |
|---|---|---|
| Name | SEQ ID | Sequence |

CAR1

| | | |
|---|---|---|
| CAR1 scFv | 1 | EIVMTQSPATLSLSPGERATLSCRASQDISKYLNWYQQKPGQAPRLLIYHT |
| domain | | SRLHSGIPARFSGSGSGTDYTLTISSLQPEDFAVYFCQQGNTLPYTFGQGT |
| | | KLEIKGGGGSGGGGSGGGGSQVQLQESGPGLVKPSETLSLTCTVSGVSLPD |
| | | YGVSWIRQPPGKGLEWIGVIWGSETTYYSSSLKSRVTISKDNSKNQVSLKL |
| | | SSVTAADTAVYYCAKHYYYGGSYAMDYWGQGTLVTVSS |
| 103101 | 61 | atggccctccctgtcaccgccctgctgcttccgctggctcttctgctccacgccgc |
| CAR1 | | tcggcccgaaattgtgatgacccagtcacccgccactcttagcctttcacccggtg |
| Soluble | | agcgcgcaaccctgtcttgcagagcctcccaagacatctcaaaataccttaattgg |
| scFv-nt | | tatcaacagaagcccggacaggctcctcgccttctgatctaccacaccagccggct |
| | | ccattctggaatccctgccaggttcagcggtagcggatctgggaccgactacaccc |
| | | tcactatcagctcactgcagccagaggacttcgctgtctatttctgtcagcaaggg |
| | | aacaccctgccctacacctttggacagggcaccaagctcgagattaaaggtggagg |
| | | tggcagcggaggaggtgggtccggcggtggaggaagccaggtccaactccaagaaa |
| | | gcggaccgggtcttgtgaagccatcagaaactctttcactgacttgtactgtgagc |
| | | ggagtgtctctccccgattacggggtgtcttggatcagacagccaccggggaaggg |
| | | tctggaatggattggagtgatttggggctctgagactacttactactcttcatccc |
| | | tcaagtcacgcgtcaccatctcaaaggacaactctaagaatcaggtgtcactgaaa |
| | | ctgtcatctgtgaccgcagccgacaccgccgtgtactattgcgctaagcattacta |
| | | ttatggcgggagctacgcaatggattactggggacagggtactctggtcaccgtgt |
| | | ccagccaccaccatcatcaccatcaccat |
| 103101 | 73 | MALPVTALLLPLALLLHAARPeivmtqspatlslspgeratlscrasqdiskylnw |
| CAR1 | | yqqkpgqaprlliyhtsrlhsgiparfsgsgsgtdytltisslqpedfavyfcqqg |
| Soluble | | ntlpytfgqgtkleikggggsggggsggggsqvqlqesgpglvkpsetlsltctvs |
| scFv-aa | | gvslpdygvswirqppgkglewigviwgsettyyssslksrvtiskdnsknqvslk |
| | | lssvtaadtavyycakhyyyggsyamdywgqgtlvtvsshhhhhhhh |
| 104875 | 85 | atggccctccctgtcaccgccctgctgcttccgctggctcttctgctccacgccgc |
| CAR1- | | tcggcccgaaattgtgatgacccagtcacccgccactcttagcctttcacccggtg |
| Full-nt | | agcgcgcaaccctgtcttgcagagcctcccaagacatctcaaaataccttaattgg |
| | | tatcaacagaagcccggacaggctcctcgccttctgatctaccacaccagccggct |
| | | ccattctggaatccctgccaggttcagcggtagcggatctgggaccgactacaccc |
| | | tcactatcagctcactgcagccagaggacttcgctgtctatttctgtcagcaaggg |
| | | aacaccctgccctacacctttggacagggcaccaagctcgagattaaaggtggagg |
| | | tggcagcggaggaggtgggtccggcggtggaggaagccaggtccaactccaagaaa |
| | | gcggaccgggtcttgtgaagccatcagaaactctttcactgacttgtactgtgagc |
| | | ggagtgtctctccccgattacggggtgtcttggatcagacagccaccggggaaggg |
| | | tctggaatggattggagtgatttggggctctgagactacttactactcttcatccc |
| | | tcaagtcacgcgtcaccatctcaaaggacaactctaagaatcaggtgtcactgaaa |
| | | ctgtcatctgtgaccgcagccgacaccgccgtgtactattgcgctaagcattacta |
| | | ttatggcgggagctacgcaatggattactggggacagggtactctggtcaccgtgt |
| | | ccagcaccactaccccagcaccgaggccacccaccccggctcctaccatcgcctcc |
| | | cagcctctgtccctgcgtccggaggcatgtagacccgcagctggtggggccgtgca |
| | | tacccggggtcttgacttcgcctgcgatatctacatttgggcccctctggctggta |
| | | cttgcggggtcctgctgctttcactcgtgatcactctttactgtaagcgcggtcgg |
| | | aagaagctgctgtacatctttaagcaacccttcatgaggcctgtgcagactactca |
| | | agaggaggacggctgttcatgccggttcccagaggaggaggaaggcggctgcgaac |
| | | tgcgcgtgaaattcagccgcagcgcagatgctccagcctacaagcaggggcagaac |
| | | cagctctacaacgaactcaatcttggtcggagagaggagtacgacgtgctggacaa |
| | | gcggagaggacgggacccagaaatgggcgggaagccgcgcagaaagaatccccaag |
| | | agggcctgtacaacgagctccaaaaggataagatggcagaagcctatagcgagatt |
| | | ggtatgaaaggggaacgcagaagaggcaaaggccacgacggactgtaccagggact |
| | | cagcaccgccaccaaggacacctatgacgctcttcacatgcaggccctgccgcctc |
| | | gg |
| 104875 | 31 | MALPVTALLLPLALLLHAARPeivmtqspatlslspgeratlscrasqdiskylnw |
| CAR1- | | yqqkpgqaprlliyhtsrlhsgiparfsgsgsgtdytltisslqpedfavyfcqqg |
| Full-aa | | ntlpytfgqgtkleikggggsggggsggggsqvqlqesgpglvkpsetlsltctvs |
| | | gvslpdygvswirqppgkglewigviwgsettyyssslksrvtiskdnsknqvslk |
| | | lssvtaadtavyycakhyyyggsyamdywgqgtlvtvsstttpaprpptpaptias |
| | | qplslrpeacrpaaggavhtrgldfacdiyiwaplagtcgvlllslvitlyckrgr |
| | | kkllyifkqpfmrpvqttqeedgcscrfpeeeeggcelrvkfsrsadapaykqgqn |
| | | qlynelnlgrreeydvldkrrgrdpemggkprrknpqeglynelqkdkmaeaysei |
| | | gmkgerrrgkghdglyqglstatkdtydalhmqalppr |

CAR2

| | | |
|---|---|---|
| CAR2 scFv | 2 | eivmtqspatlslspgeratlscrasqdiskylnwyqqkpgqaprlliyhtsrlhs |
| domain | | giparfsgsgsgtdytltisslqpedfavyfcqqgntlpytfgqgtkleikggggs |
| | | ggggsggggsqvqlqesgpglvkpsetlsltctvsgvslpdygvswirqppgkgle |
| | | wigviwgsettyyqsslksrvtiskdnsknqvslklssvtaadtavyycakhyyyg |
| | | gsyamdywgqgtlvtvss |
| 103102 | 62 | atggccctccctgtcaccgccctgctgcttccgctggctcttctgctccacgccgc |
| CAR2- | | tcggcccgaaattgtgatgacccagtcacccgccactcttagcctttcacccggtg |
| Soluble | | agcgcgcaaccctgtcttgcagagcctcccaagacatctcaaaataccttaattgg |
| scFv-nt | | tatcaacagaagcccggacaggctcctcgccttctgatctaccacaccagccggct |
| | | ccattctggaatccctgccaggttcagcggtagcggatctgggaccgactacaccc |
| | | tcactatcagctcactgcagccagaggacttcgctgtctatttctgtcagcaaggg |
| | | aacaccctgccctacacctttggacagggcaccaagctcgagattaaaggtggagg |
| | | tggcagcggaggaggtgggtccggcggtggaggaagccaggtccaactccaagaaa |
| | | gcggaccgggtcttgtgaagccatcagaaactctttcactgacttgtactgtgagc |
| | | ggagtgtctctccccgattacggggtgtcttggatcagacagccaccggggaaggg |
| | | tctggaatggattggagtgatttggggctctgagactacttactaccaatcatccc |
| | | tcaagtcacgcgtcaccatctcaaaggacaactctaagaatcaggtgtcactgaaa |
| | | ctgtcatctgtgaccgcagccgacaccgccgtgtactattgcgctaagcattacta |
| | | ttatggcgggagctacgcaatggattactggggacagggtactctggtcaccgtgt |
| | | ccagccaccaccatcatcaccatcaccat |
| 103102 | 74 | MALPVTALLLPLALLLHAARPeivmtqspatlslspgeratlscrasqdiskylnw |
| CAR2- | | yqqkpgqaprlliyhtsrlhsgiparfsgsgsgtdytltisslqpedfavyfcqqg |
| Soluble | | ntlpytfgqgtkleikggggsggggsggggsqvqlqesgpglvkpsetlsltctvs |
| scFv-aa | | gvslpdygvswirqppgkglewigviwgsettyyqsslksrvtiskdnsknqvslk |
| | | lssvtaadtavyycakhyyyggsyamdywgqgtlvtvsshhhhhhhh |
| 104876 | 86 | atggccctccctgtcaccgccctgctgcttccgctggctcttctgctccacgccgc |
| CAR2- | | tcggcccgaaattgtgatgacccagtcacccgccactcttagcctttcacccggtg |
| Full-nt | | agcgcgcaaccctgtcttgcagagcctcccaagacatctcaaaataccttaattgg |
| | | tatcaacagaagcccggacaggctcctcgccttctgatctaccacaccagccggct |
| | | ccattctggaatccctgccaggttcagcggtagcggatctgggaccgactacaccc |
| | | tcactatcagctcactgcagccagaggacttcgctgtctatttctgtcagcaaggg |
| | | aacaccctgccctacacctttggacagggcaccaagctcgagattaaaggtggagg |
| | | tggcagcggaggaggtgggtccggcggtggaggaagccaggtccaactccaagaaa |
| | | gcggaccgggtcttgtgaagccatcagaaactctttcactgacttgtactgtgagc |
| | | ggagtgtctctccccgattacggggtgtcttggatcagacagccaccggggaaggg |
| | | tctggaatggattggagtgatttggggctctgagactacttactaccaatcatccc |
| | | tcaagtcacgcgtcaccatctcaaaggacaactctaagaatcaggtgtcactgaaa |
| | | ctgtcatctgtgaccgcagccgacaccgccgtgtactattgcgctaagcattacta |
| | | ttatggcgggagctacgcaatggattactggggacagggtactctggtcaccgtgt |
| | | ccagcaccactaccccagcaccgaggccacccaccccggctcctaccatcgcctcc |
| | | cagcctctgtccctgcgtccggaggcatgtagacccgcagctggtggggccgtgca |
| | | tacccggggtcttgacttcgcctgcgatatctacatttgggcccctctggctggta |
| | | cttgcggggtcctgctgctttcactcgtgatcactctttactgtaagcgcggtcgg |
| | | aagaagctgctgtacatctttaagcaacccttcatgaggcctgtgcagactactca |
| | | agaggaggacggctgttcatgccggttcccagaggaggaggaaggcggctgcgaac |
| | | tgcgcgtgaaattcagccgcagcgcagatgctccagcctacaagcaggggcagaac |
| | | cagctctacaacgaactcaatcttggtcggagagaggagtacgacgtgctggacaa |
| | | gcggagaggacgggacccagaaatgggcgggaagccgcgcagaaagaatccccaag |
| | | agggcctgtacaacgagctccaaaaggataagatggcagaagcctatagcgagatt |
| | | ggtatgaaaggggaacgcagaagaggcaaaggccacgacggactgtaccagggact |
| | | cagcaccgccaccaaggacacctatgacgctcttcacatgcaggccctgccgcctc |
| | | gg |
| 104876 | 32 | MALPVTALLLPLALLLHAARPeivmtqspatlslspgeratlscrasqdiskylnw |
| CAR2- | | yqqkpgqaprlliyhtsrlhsgiparfsgsgsgtdytltisslqpedfavyfcqqq |
| Full-aa | | ntlpytfgqgtkleikggggsggggsggggsqvqlqesgpglvkpsetlsltctvs |
| | | gvslpdygvswirqppgkglewigviwgsettyyqsslksrvtiskdnsknqvslk |
| | | lssvtaadtavyycakhyyyggsyamdywgqgtlvtvsstttpaprpptpaptias |
| | | qplslrpeacrpaaggavhtrgldfacdiyiwaplagtcgvlllslvitlyckrgr |
| | | kkllyifkqpfmrpvqttqeedgcscrfpeeeeggcelrvkfsrsadapaykqgqn |
| | | qlynelnlgrreeydvldkrrgrdpemggkprrknpqeglynelqkdkmaeaysei |
| | | gmkgerrrgkghdglyqglstatkdtydalhmqalppr |

CAR3

| | | |
|---|---|---|
| CAR3 scFv | 3 | qvqlqesgpglvkpsetlsltctvsgvslpdygvswirqppgkglewigviwgset |
| domain | | tyyssslksrvtiskdnsknqvslklssvtaadtavyycakhyyyggsyamdywgq |
| | | gtlvtvssggggsggggsggggseivmtqspatlslspgeratlscrasqdiskyl |
| | | nwyqqkpgqaprlliyhtsrlhsgiparfsgsgsgtdytltisslqpedfavyfcq |
| | | qgntlpytfgqgtkleik |
| 103104 | 63 | atggctctgcccgtgaccgcactcctcctgccactggctctgctgcttcacgccgc |
| CAR3- | | tcgcccacaagtccagcttcaagaatcagggcctggtctggtgaagccatctgaga |
| Soluble | | ctctgtccctcacttgcaccgtgagcggagtgtccctcccagactacggagtgagc |
| scFv-nt | | tggattagacagcctcccggaaagggactggagtggatcggagtgatttggggtag |
| | | cgaaaccacttactattcatcttccctgaagtcacgggtcaccatttcaaaggata |
| | | actcaaagaatcaagtgagcctcaagctctcatcagtcaccgccgctgacaccgcc |
| | | gtgtattactgtgccaagcattactactatggagggtcctacgccatggactactg |
| | | gggccagggaactctggtcactgtgtcatctggtggaggaggtagcggaggaggcg |
| | | ggagcggtggaggtggctccgaaatcgtgatgacccagagccctgcaaccctgtcc |
| | | ctttctcccggggaacgggctaccctttcttgtcgggcatcacaagatatctcaaa |
| | | atacctcaattggtatcaacagaagccgggacaggcccctaggcttcttatctacc |
| | | acacctctcgcctgcatagcgggattcccgcacgctttagcgggtctggaagcggg |
| | | accgactacactctgaccatctcatctctccagcccgaggacttcgccgtctactt |
| | | ctgccagcagggtaacaccctgccgtacaccttcggccagggcaccaagcttgaga |
| | | tcaaacatcaccaccatcatcaccatcac |
| 103104 | 75 | MALPVTALLLPLALLLHAARPqvqlqesgpglvkpsetlsltctvsgvslpdygvs |
| CAR3- | | wirqppgkglewigviwgsettyyssslksrvtiskdnsknqvslklssvtaadta |
| Soluble | | vyycakhyyyggsyamdywgqgtlvtvssggggsggggsggggseivmtqspatls |
| scFv-aa | | lspgeratlscrasqdiskylnwyqqkpgqaprlliyhtsrlhsgiparfsgsgsg |
| | | tdytltisslqpedfavyfcqqgntlpytfgqgtkleikhhhhhhhh |
| 104877 | 87 | atggctctgcccgtgaccgcactcctcctgccactggctctgctgcttcacgccgc |
| CAR3- | | tcgcccacaagtccagcttcaagaatcagggcctggtctggtgaagccatctgaga |
| Full-nt | | ctctgtccctcacttgcaccgtgagcggagtgtccctcccagactacggagtgagc |
| | | tggattagacagcctcccggaaagggactggagtggatcggagtgatttggggtag |
| | | cgaaaccacttactattcatcttccctgaagtcacgggtcaccatttcaaaggata |
| | | actcaaagaatcaagtgagcctcaagctctcatcagtcaccgccgctgacaccgcc |
| | | gtgtattactgtgccaagcattactactatggagggtcctacgccatggactactg |
| | | gggccagggaactctggtcactgtgtcatctggtggaggaggtagcggaggaggcg |
| | | ggagcggtggaggtggctccgaaatcgtgatgacccagagccctgcaaccctgtcc |
| | | ctttctcccggggaacgggctaccctttcttgtcgggcatcacaagatatctcaaa |
| | | atacctcaattggtatcaacagaagccgggacaggcccctaggcttcttatctacc |
| | | acacctctcgcctgcatagcgggattcccgcacgctttagcgggtctggaagcggg |
| | | accgactacactctgaccatctcatctctccagcccgaggacttcgccgtctactt |
| | | ctgccagcagggtaacaccctgccgtacaccttcggccagggcaccaagcttgaga |
| | | tcaaaaccactactcccgctccaaggccacccacccctgccccgaccatcgcctct |
| | | cagccgctttccctgcgtccggaggcatgtagacccgcagctggtggggccgtgca |
| | | tacccggggtcttgacttcgcctgcgatatctacatttgggcccctctggctggta |
| | | cttgcggggtcctgctgctttcactcgtgatcactctttactgtaagcgcggtcgg |
| | | aagaagctgctgtacatctttaagcaacccttcatgaggcctgtgcagactactca |
| | | agaggaggacggctgttcatgccggttcccagaggaggaggaaggcggctgcgaac |
| | | tgcgcgtgaaattcagccgcagcgcagatgctccagcctacaagcaggggcagaac |
| | | cagctctacaacgaactcaatcttggtcggagagaggagtacgacgtgctggacaa |
| | | gcggagaggacgggacccagaaatgggcgggaagccgcgcagaaagaatccccaag |
| | | agggcctgtacaacgagctccaaaaggataagatggcagaagcctatagcgagatt |
| | | ggtatgaaaggggaacgcagaagaggcaaaggccacgacggactgtaccagggact |
| | | cagcaccgccaccaaggacacctatgacgctcttcacatgcaggccctgccgcctc |
| | | gg |
| 104877 | 33 | MALPVTALLLPLALLLHAARPqvqlqesgpglvkpsetlsltctvsgvslpdygvs |
| CAR3- | | wirqppgkglewigviwgsettyyssslksrvtiskdnsknqvslklssvtaadta |
| Full-aa | | vyycakhyyyggsyamdywgqgtlvtvssggggsggggsggggseivmtqspatls |
| | | lspgeratlscrasqdiskylnwyqqkpgqaprlliyhtsrlhsgiparfsgsgsg |
| | | tdytltisslqpedfavyfcqqgntlpytfgqgtkleiktttpaprpptpaptias |
| | | qplslrpeacrpaaggavhtrgldfacdiyiwaplagtcgvlllslvitlyckrgr |
| | | kkllyifkqpfmrpvqttqeedgcscrfpeeeeggcelrvkfsrsadapaykqgqn |
| | | qlynelnlgrreeydvldkrrgrdpemggkprrknpqeglynelqkdkmaeaysei |
| | | gmkgerrrgkghdglyqglstatkdtydalhmqalppr |

CAR4

| | | |
|---|---|---|
| CAR4 scFv | 4 | qvqlqesgpglvkpsetlsltctvsgvslpdygvswirqppgkglewigviwgset |
| domain | | tyyqsslksrvtiskdnsknqvslklssvtaadtavyycakhyyyggsyamdywgq |
| | | gtlvtvssggggsggggsggggseivmtqspatlslspgeratlscrasqdiskyl |
| | | nwyqqkpgqaprlliyhtsrlhsgiparfsgsgsgtdytltisslqpedfavyfcq |
| | | qgntlpytfgqgtkleik |
| 103106 | 64 | atggctctgcccgtgaccgcactcctcctgccactggctctgctgcttcacgccgc |
| CAR4- | | tcgcccacaagtccagcttcaagaatcagggcctggtctggtgaagccatctgaga |
| Soluble | | ctctgtccctcacttgcaccgtgagcggagtgtccctcccagactacggagtgagc |
| scFv-nt | | tggattagacagcctcccggaaagggactggagtggatcggagtgatttggggtag |
| | | cgaaaccacttactatcaatcttccctgaagtcacgggtcaccatttcaaaggata |
| | | actcaaagaatcaagtgagcctcaagctctcatcagtcaccgccgctgacaccgcc |
| | | gtgtattactgtgccaagcattactactatggagggtcctacgccatggactactg |
| | | gggccagggaactctggtcactgtgtcatctggtggaggaggtagcggaggaggcg |
| | | ggagcggtggaggtggctccgaaatcgtgatgacccagagccctgcaaccctgtcc |
| | | ctttctcccggggaacgggctaccctttcttgtcgggcatcacaagatatctcaaa |
| | | atacctcaattggtatcaacagaagccgggacaggcccctaggcttcttatctacc |
| | | acacctctcgcctgcatagcgggattcccgcacgctttagcgggtctggaagcggg |
| | | accgactacactctgaccatctcatctctccagcccgaggacttcgccgtctactt |
| | | ctgccagcagggtaacaccctgccgtacaccttcggccagggcaccaagcttgaga |
| | | tcaaacatcaccaccatcatcaccatcac |
| 103106 | 76 | MALPVTALLLPLALLLHAARPqvqlqesgpglvkpsetlsltctvsgvslpdygvs |
| CAR4- | | wirqppgkglewigviwgsettyyqsslksrvtiskdnsknqvslklssvtaadta |
| Soluble | | vyycakhyyyggsyamdywgqgtlvtvssggggsggggsggggseivmtqspatls |
| scFv-aa | | lspgeratlscrasqdiskylnwyqqkpgqaprlliyhtsrlhsgiparfsgsgsg |
| | | tdytltisslqpedfavyfcqqgntlpytfgqgtkleikhhhhhhhh |
| 104878 | 88 | atggctctgcccgtgaccgcactcctcctgccactggctctgctgcttcacgccgc |
| CAR4- | | tcgcccacaagtccagcttcaagaatcagggcctggtctggtgaagccatctgaga |
| Full-nt | | ctctgtccctcacttgcaccgtgagcggagtgtccctcccagactacggagtgagc |
| | | tggattagacagcctcccggaaagggactggagtggatcggagtgatttggggtag |
| | | cgaaaccacttactatcaatcttccctgaagtcacgggtcaccatttcaaaggata |
| | | actcaaagaatcaagtgagcctcaagctctcatcagtcaccgccgctgacaccgcc |
| | | gtgtattactgtgccaagcattactactatggagggtcctacgccatggactactg |
| | | gggccagggaactctggtcactgtgtcatctggtggaggaggtagcggaggaggcg |
| | | ggagcggtggaggtggctccgaaatcgtgatgacccagagccctgcaaccctgtcc |
| | | ctttctcccggggaacgggctaccctttcttgtcgggcatcacaagatatctcaaa |
| | | atacctcaattggtatcaacagaagccgggacaggcccctaggcttcttatctacc |
| | | acacctctcgcctgcatagcgggattcccgcacgctttagcgggtctggaagcggg |
| | | accgactacactctgaccatctcatctctccagcccgaggacttcgccgtctactt |
| | | ctgccagcagggtaacaccctgccgtacaccttcggccagggcaccaagcttgaga |
| | | tcaaaaccactactcccgctccaaggccacccacccctgccccgaccatcgcctct |
| | | cagccgctttccctgcgtccggaggcatgtagacccgcagctggtggggccgtgca |
| | | tacccggggtcttgacttcgcctgcgatatctacatttgggcccctctggctggta |
| | | cttgcggggtcctgctgctttcactcgtgatcactctttactgtaagcgcggtcgg |
| | | aagaagctgctgtacatctttaagcaacccttcatgaggcctgtgcagactactca |
| | | agaggaggacggctgttcatgccggttcccagaggaggaggaaggcggctgcgaac |
| | | tgcgcgtgaaattcagccgcagcgcagatgctccagcctacaagcaggggcagaac |
| | | cagctctacaacgaactcaatcttggtcggagagaggagtacgacgtgctggacaa |
| | | gcggagaggacgggacccagaaatgggcgggaagccgcgcagaaagaatccccaag |
| | | agggcctgtacaacgagctccaaaaggataagatggcagaagcctatagcgagatt |
| | | ggtatgaaaggggaacgcagaagaggcaaaggccacgacggactgtaccagggact |
| | | cagcaccgccaccaaggacacctatgacgctcttcacatgcaggccctgccgcctc |
| | | gg |
| 104878 | 34 | MALPVTALLLPLALLLHAARPqvqlqesgpglvkpsetlsltctvsgvslpdygvs |
| CAR4- | | wirqppgkglewigviwgsettyyqsslksrvtiskdnsknqvslklssvtaadta |
| Full-aa | | vyycakhyyyggsyamdywgqgtlvtvssggggsggggsggggseivmtqspatls |
| | | lspgeratlscrasqdiskylnwyqqkpgqaprlliyhtsrlhsgiparfsgsgsg |
| | | tdytltisslqpedfavyfcqqgntlpytfgqgtkleiktttpaprpptpaptias |
| | | qplslrpeacrpaaggavhtrgldfacdiyiwaplagtcgvlllslvitlyckrgr |
| | | kkllyifkqpfmrpvqttqeedgcscrfpeeeeggcelrvkfsrsadapaykqgqn |
| | | qlynelnlgrreeydvldkrrgrdpemggkprrknpqeglynelqkdkmaeaysei |
| | | gmkgerrrgkghdglyqglstatkdtydalhmqalppr |

CAR5

| | | |
|---|---|---|
| CAR5 scFv | 5 | eivmtqspatlslspgeratlscrasqdiskylnwyqqkpgqaprlliyhtsrlhs |
| domain | | giparfsgsgsgtdytltisslqpedfavyfcqqgntlpytfgqgtkleikggggs |
| | | ggggsggggsggggsqvqlqesgpglvkpsetlsltctvsgvslpdygvswirqpp |
| | | gkglewigviwgsettyyssslksrvtiskdnsknqvslklssvtaadtavyycak |
| | | hyyyggsyamdywgqgtlvtvss |
| 99789 | 65 | atggccctcccagtgaccgctctgctgctgcctctcgcacttcttctccatgccgc |
| CAR5- | | tcggcctgagatcgtcatgacccaaagccccgctaccctgtccctgtcacccggcg |
| Soluble | | agagggcaaccctttcatgcagggccagccaggacatttctaagtacctcaactgg |
| scFv-nt | | tatcagcagaagccagggcaggctcctcgcctgctgatctaccacaccagccgcct |
| | | ccacagcggtatccccgccagattttccgggagcgggtctggaaccgactacaccc |
| | | tcaccatctcttctctgcagcccgaggatttcgccgtctatttctgccagcagggg |
| | | aatactctgccgtacaccttcggtcaaggtaccaagctggaaatcaagggaggcgg |
| | | aggatcaggcggtggcggaagcggaggaggtggctccggaggaggaggttcccaag |
| | | tgcagcttcaagaatcaggacccggacttgtgaagccatcagaaaccctctccctg |
| | | acttgtaccgtgtccggtgtgagcctccccgactacggagtctcttggattcgcca |
| | | gcctccggggaagggtcttgaatggattggggtgatttggggatcagagactactt |
| | | actactcttcatcacttaagtcacgggtcaccatcagcaaagataatagcaagaac |
| | | caagtgtcacttaagctgtcatctgtgaccgccgctgacaccgccgtgtactattg |
| | | tgccaaacattactattacggagggtcttatgctatggactactggggacagggga |
| | | ccctggtgactgtctctagccatcaccatcaccaccatcatcac |
| 99789 | 77 | MALPVTALLLPLALLLHAARPeivmtqspatlslspgeratlscrasqdiskylnw |
| CAR5- | | yqqkpgqaprlliyhtsrlhsgiparfsgsgsgtdytltisslqpedfavyfcqqg |
| Soluble | | ntlpytfgqgtkleikggggsggggsggggsggggsqvqlqesgpglvkpsetlsl |
| scFv-aa | | tctvsgvslpdygvswirqppgkglewigviwgsettyyssslksrvtiskdnskn |
| | | qvslklssvtaadtavyycakhyyyggsyamdywgqgtlvtvsshhhhhhhh |
| 104879 | 89 | atggccctccctgtcaccgccctgctgcttccgctggctcttctgctccacgccgc |
| CAR5- | | tcggcccgaaattgtgatgacccagtcacccgccactcttagcctttcacccggtg |
| Full-nt | | agcgcgcaaccctgtcttgcagagcctcccaagacatctcaaaataccttaattgg |
| | | tatcaacagaagcccggacaggctcctcgccttctgatctaccacaccagccggct |
| | | ccattctggaatccctgccaggttcagcggtagcggatctgggaccgactacaccc |
| | | tcactatcagctcactgcagccagaggacttcgctgtctatttctgtcagcaaggg |
| | | aacaccctgccctacacctttggacagggcaccaagctcgagattaaaggtggagg |
| | | tggcagcggaggaggtgggtccggcggtggaggaagcggcggaggcgggagccagg |
| | | tccaactccaagaaagcggaccgggtcttgtgaagccatcagaaactctttcactg |
| | | acttgtactgtgagcggagtgtctctccccgattacggggtgtcttggatcagaca |
| | | gccaccggggaagggtctggaatggattggagtgatttggggctctgagactactt |
| | | actactcttcatccctcaagtcacgcgtcaccatctcaaaggacaactctaagaat |
| | | caggtgtcactgaaactgtcatctgtgaccgcagccgacaccgccgtgtactattg |
| | | cgctaagcattactattatggcgggagctacgcaatggattactggggacagggta |
| | | ctctggtcaccgtgtccagcaccactaccccagcaccgaggccacccaccccggct |
| | | cctaccatcgcctcccagcctctgtccctgcgtccggaggcatgtagacccgcagc |
| | | tggtggggccgtgcatacccggggtcttgacttcgcctgcgatatctacatttggg |
| | | cccctctggctggtacttgcggggtcctgctgctttcactcgtgatcactctttac |
| | | tgtaagcgcggtcggaagaagctgctgtacatctttaagcaacccttcatgaggcc |
| | | tgtgcagactactcaagaggaggacggctgttcatgccggttcccagaggaggagg |
| | | aaggcggctgcgaactgcgcgtgaaattcagccgcagcgcagatgctccagcctac |
| | | aagcaggggcagaaccagctctacaacgaactcaatcttggtcggagagaggagta |
| | | cgacgtgctggacaagcggagaggacgggacccagaaatgggcgggaagccgcgca |
| | | gaaagaatccccaagagggcctgtacaacgagctccaaaaggataagatggcagaa |
| | | gcctatagcgagattggtatgaaaggggaacgcagaagaggcaaaggccacgacgg |
| | | actgtaccagggactcagcaccgccaccaaggacacctatgacgctcttcacatgc |
| | | aggccctgccgcctcgg |
| 104879 | 35 | MALPVTALLLPLALLLHAARPeivmtqspatlslspgeratlscrasqdiskylnw |
| CAR5- | | yqqkpgqaprlliyhtsrlhsgiparfsgsgsgtdytltisslqpedfavyfcqqg |
| Full-aa | | ntlpytfgqgtkleikggggsggggsggggsggggsqvqlqesgpglvkpsetlsl |
| | | tctvsgvslpdygvswirqppgkglewigviwgsettyyssslksrvtiskdnskn |
| | | qvslklssvtaadtavyycakhyyyggsyamdywgqgtlvtvsstttpaprpptpa |
| | | ptiasqplslrpeacrpaaggavhtrgldfacdiyiwaplagtcgvlllslvitly |
| | | ckrgrkkllyifkqpfmrpvqttqeedgcscrfpeeeeggcelrvkfsrsadapay |
| | | kqgqnqlynelnlgrreeydvldkrrgrdpemggkprrknpqeglynelqkdkmae |
| | | ayseigmkgerrrgkghdglyqglstatkdtydalhmqalppr |

CAR6

| | | |
|---|---|---|
| CAR6 | 6 | eivmtqspatlslspgeratlscrasqdiskylnwyqqkpgqaprlliyhtsrlhs |
| scFv | | giparfsgsgsgtdytltisslqpedfavyfcqqgntlpytfgqgtkleikggggs |
| domain | | ggggsggggsggggsqvqlqesgpglvkpsetlsltctvsgvslpdygvswirqpp |
| | | gkglewigviwgsettyyqsslksrvtiskdnsknqvslklssvtaadtavyycak |
| | | hyyyggsyamdywgqgtlvtvss |
| 99790 | 66 | atggccctcccagtgaccgctctgctgctgcctctcgcacttcttctccatgccgc |
| CAR6- | | tcggcctgagatcgtcatgacccaaagccccgctaccctgtccctgtcacccggcg |
| Soluble | | agagggcaaccctttcatgcagggccagccaggacatttctaagtacctcaactgg |
| scFv-nt | | tatcagcagaagccagggcaggctcctcgcctgctgatctaccacaccagccgcct |
| | | ccacagcggtatccccgccagattttccgggagcgggtctggaaccgactacaccc |
| | | tcaccatctcttctctgcagcccgaggatttcgccgtctatttctgccagcagggg |
| | | aatactctgccgtacaccttcggtcaaggtaccaagctggaaatcaagggaggcgg |
| | | aggatcaggcggtggcggaagcggaggaggtggctccggaggaggaggttcccaag |
| | | tgcagcttcaagaatcaggacccggacttgtgaagccatcagaaaccctctccctg |
| | | acttgtaccgtgtccggtgtgagcctccccgactacggagtctcttggattcgcca |
| | | gcctccggggaagggtcttgaatggattggggtgatttggggatcagagactactt |
| | | actaccagtcatcacttaagtcacgggtcaccatcagcaaagataatagcaagaac |
| | | caagtgtcacttaagctgtcatctgtgaccgccgctgacaccgccgtgtactattg |
| | | tgccaaacattactattacggagggtcttatgctatggactactggggacagggga |
| | | ccctggtgactgtctctagccatcaccatcaccaccatcatcac |
| 99790 | 78 | MALPVTALLLPLALLLHAARPeivmtqspatlslspgeratlscrasqdiskylnw |
| CAR6- | | yqqkpgqaprlliyhtsrlhsgiparfsgsgsgtdytltisslqpedfavyfcqqg |
| Soluble | | ntlpytfgqgtkleikggggsggggsggggsggggsqvqlqesgpglvkpsetlsl |
| scFv-aa | | tctvsgvslpdygvswirqppgkglewigviwgsettyyqsslksrvtiskdnskn |
| | | qvslklssvtaadtavyycakhyyyggsyamdywgqgtlvtvsshhhhhhhh |
| 104880 | 90 | atggccctccctgtcaccgccctgctgcttccgctggctcttctgctccacgccgc |
| CAR6- | | tcggcccgaaattgtgatgacccagtcacccgccactcttagcctttcacccggtg |
| Full-nt | | agcgcgcaaccctgtcttgcagagcctcccaagacatctcaaaataccttaattgg |
| | | tatcaacagaagcccggacaggctcctcgccttctgatctaccacaccagccggct |
| | | ccattctggaatccctgccaggttcagcggtagcggatctgggaccgactacaccc |
| | | tcactatcagctcactgcagccagaggacttcgctgtctatttctgtcagcaaggg |
| | | aacaccctgccctacacctttggacagggcaccaagctcgagattaaaggtggagg |
| | | tggcagcggaggaggtgggtccggcggtggaggaagcggaggcggagggagccagg |
| | | tccaactccaagaaagcggaccgggtcttgtgaagccatcagaaactctttcactg |
| | | acttgtactgtgagcggagtgtctctccccgattacggggtgtcttggatcagaca |
| | | gccaccggggaagggtctggaatggattggagtgatttggggctctgagactactt |
| | | actaccaatcatccctcaagtcacgcgtcaccatctcaaaggacaactctaagaat |
| | | caggtgtcactgaaactgtcatctgtgaccgcagccgacaccgccgtgtactattg |
| | | cgctaagcattactattatggcgggagctacgcaatggattactggggacagggta |
| | | ctctggtcaccgtgtccagcaccactaccccagcaccgaggccacccaccccggct |
| | | cctaccatcgcctcccagcctctgtccctgcgtccggaggcatgtagacccgcagc |
| | | tggtggggccgtgcatacccggggtcttgacttcgcctgcgatatctacatttggg |
| | | cccctctggctggtacttgcggggtcctgctgctttcactcgtgatcactctttac |
| | | tgtaagcgcggtcggaagaagctgctgtacatctttaagcaacccttcatgaggcc |
| | | tgtgcagactactcaagaggaggacggctgttcatgccggttcccagaggaggagg |
| | | aaggcggctgcgaactgcgcgtgaaattcagccgcagcgcagatgctccagcctac |
| | | aagcaggggcagaaccagctctacaacgaactcaatcttggtcggagagaggagta |
| | | cgacgtgctggacaagcggagaggacgggacccagaaatgggcgggaagccgcgca |
| | | gaaagaatccccaagagggcctgtacaacgagctccaaaaggataagatggcagaa |
| | | gcctatagcgagattggtatgaaaggggaacgcagaagaggcaaaggccacgacgg |
| | | actgtaccagggactcagcaccgccaccaaggacacctatgacgctcttcacatgc |
| | | aggccctgccgcctcgg |
| 104880 | 36 | MALPVTALLLPLALLLHAARPeivmtqspatlslspgeratlscrasqdiskylnw |
| CAR6- | | yqqkpgqaprlliyhtsrlhsgiparfsgsgsgtdytltisslqpedfavyfcqqg |
| Full-aa | | ntlpytfgqgtkleikggggsggggsggggsggggsqvqlqesgpglvkpsetlsl |
| | | tctvsgvslpdygvswirqppgkglewigviwgsettyyqsslksrvtiskdnskn |
| | | qvslklssvtaadtavyycakhyyyggsyamdywgqgtlvtvsstttpaprpptpa |
| | | ptiasqplslrpeacrpaaggavhtrgldfacdiyiwaplagtcgvlllslvitly |
| | | ckrgrkkllyifkqpfmrpvqttqeedgcscrfpeeeeggcelrvkfsrsadapay |
| | | kqgqnqlynelnlgrreeydvldkrrgrdpemggkprrknpqeglynelqkdkmae |
| | | ayseigmkgerrrgkghdglyqglstatkdtydalhmqalppr |

CAR7

| | | |
|---|---|---|
| CAR7 scFv | 7 | qvqlqesgpglvkpsetlsltctvsgvslpdygvswirqppgkglewigviwgset |
| domain | | tyyssslksrvtiskdnsknqvslklssvtaadtavyycakhyyyggsyamdywgq |
| | | gtlvtvssggggsggggsggggsggggseivmtqspatlslspgeratlscrasqd |
| | | iskylnwyqqkpgqaprlliyhtsrlhsgiparfsgsgsgtdytltisslqpedfa |
| | | vyfcqqgntlpytfgqgtkleik |
| 100796 | 67 | atggcactgcctgtcactgccctcctgctgcctctggccctccttctgcatgccgc |
| CAR7- | | caggccccaagtccagctgcaagagtcaggacccggactggtgaagccgtctgaga |
| Soluble | | ctctctcactgacttgtaccgtcagcggcgtgtccctccccgactacggagtgtca |
| scFv-nt | | tggatccgccaacctcccgggaaagggcttgaatggattggtgtcatctggggttc |
| | | tgaaaccacctactactcatcttccctgaagtccagggtgaccatcagcaaggata |
| | | attccaagaaccaggtcagccttaagctgtcatctgtgaccgctgctgacaccgcc |
| | | gtgtattactgcgccaagcactactattacggaggaagctacgctatggactattg |
| | | gggacagggcactctcgtgactgtgagcagcggcggtggagggtctggaggtggag |
| | | gatccggtggtggtgggtcaggcggaggagggagcgagattgtgatgactcagtca |
| | | ccagccaccctttctctttcacccggcgagagagcaaccctgagctgtagagccag |
| | | ccaggacatttctaagtacctcaactggtatcagcaaaaaccggggcaggcccctc |
| | | gcctcctgatctaccatacctcacgccttcactctggtatccccgctcggtttagc |
| | | ggatcaggatctggtaccgactacactctgaccatttccagcctgcagccagaaga |
| | | tttcgcagtgtatttctgccagcagggcaatacccttccttacaccttcggtcagg |
| | | gaaccaagctcgaaatcaagcaccatcaccatcatcaccaccat |
| 100796 | 79 | MALPVTALLLPLALLLHAARPqvqlqesgpglvkpsetlsltctvsgvslpdygvs |
| CAR7- | | wirqppgkglewigviwgsettyyssslksrvtiskdnsknqvslklssvtaadta |
| Soluble | | vyycakhyyyggsyamdywgqgtlvtvssggggsggggsggggsggggseivmtqs |
| scFv-aa | | patlslspgeratlscrasqdiskylnwyqqkpgqaprlliyhtsrlhsgiparfs |
| | | gsgsgtdytltisslqpedfavyfcqqgntlpytfgqgtkleikhhhhhhhh |
| 104881 | 91 | atggctctgcccgtgaccgcactcctcctgccactggctctgctgcttcacgccgc |
| CAR7 | | tcgcccacaagtccagcttcaagaatcagggcctggtctggtgaagccatctgaga |
| Full-nt | | ctctgtccctcacttgcaccgtgagcggagtgtccctcccagactacggagtgagc |
| | | tggattagacagcctcccggaaagggactggagtggatcggagtgatttggggtag |
| | | cgaaaccacttactattcatcttccctgaagtcacgggtcaccatttcaaaggata |
| | | actcaaagaatcaagtgagcctcaagctctcatcagtcaccgccgctgacaccgcc |
| | | gtgtattactgtgccaagcattactactatggagggtcctacgccatggactactg |
| | | gggccagggaactctggtcactgtgtcatctggtggaggaggtagcggaggaggcg |
| | | ggagcggtggaggtggctccggaggtggcggaagcgaaatcgtgatgacccagagc |
| | | cctgcaaccctgtccctttctcccggggaacgggctaccctttcttgtcgggcatc |
| | | acaagatatctcaaaatacctcaattggtatcaacagaagccgggacaggccccta |
| | | ggcttcttatctaccacacctctcgcctgcatagcgggattcccgcacgctttagc |
| | | gggtctggaagcgggaccgactacactctgaccatctcatctctccagcccgagga |
| | | cttcgccgtctacttctgccagcagggtaacaccctgccgtacaccttcggccagg |
| | | gcaccaagcttgagatcaaaaccactactcccgctccaaggccacccacccctgcc |
| | | ccgaccatcgcctctcagccgctttccctgcgtccggaggcatgtagacccgcagc |
| | | tggtggggccgtgcatacccggggtcttgacttcgcctgcgatatctacatttggg |
| | | cccctctggctggtacttgcggggtcctgctgctttcactcgtgatcactctttac |
| | | tgtaagcgcggtcggaagaagctgctgtacatctttaagcaacccttcatgaggcc |
| | | tgtgcagactactcaagaggaggacggctgttcatgccggttcccagaggaggagg |
| | | aaggcggctgcgaactgcgcgtgaaattcagccgcagcgcagatgctccagcctac |
| | | aagcaggggcagaaccagctctacaacgaactcaatcttggtcggagagaggagta |
| | | cgacgtgctggacaagcggagaggacgggacccagaaatgggcgggaagccgcgca |
| | | gaaagaatccccaagagggcctgtacaacgagctccaaaaggataagatggcagaa |
| | | gcctatagcgagattggtatgaaaggggaacgcagaagaggcaaaggccacgacgg |
| | | actgtaccagggactcagcaccgccaccaaggacacctatgacgctcttcacatgc |
| | | aggccctgccgcctcgg |
| 104881 | 37 | MALPVTALLLPLALLLHAARPqvqlqesgpglvkpsetlsltctvsgvslpdygvs |
| CAR7 | | wirqppgkglewigviwgsettyyssslksrvtiskdnsknqvslklssvtaadta |
| Full-aa | | vyycakhyyyggsyamdywgqgtlvtvssggggsggggsggggsggggseivmtqs |
| | | patlslspgeratlscrasqdiskylnwyqqkpgqaprlliyhtsrlhsgiparfs |
| | | gsgsgtdytltisslqpedfavyfcqqgntlpytfgqgtkleiktttpaprpptpa |
| | | ptiasqplslrpeacrpaaggavhtrgldfacdiyiwaplagtcgvlllslvitly |
| | | ckrgrkkllyifkqpfmrpvqttqeedgcscrfpeeeeggcelrvkfsrsadapay |
| | | kqgqnqlynelnlgrreeydvldkrrgrdpemggkprrknpqeglynelqkdkmae |
| | | ayseigmkgerrrgkghdglyqglstatkdtydalhmqalppr |

CAR8

| | | |
|---|---|---|
| CAR8 scFv | 8 | qvqlqesgpglvkpsetlsltctvsgvslpdygvswirqppgkglewigviwgset |
| domain | | tyyqsslksrvtiskdnsknqvslklssvtaadtavyycakhyyyggsyamdywgq |
| | | gtlvtvssggggsggggsggggsggggseivmtqspatlslspgeratlscrasqd |
| | | iskylnwyqqkpgqaprlliyhtsrlhsgiparfsgsgsgtdytltisslqpedfa |
| | | vyfcqqgntlpytfgqgtkleik |
| 100798 | 68 | atggcactgcctgtcactgccctcctgctgcctctggccctccttctgcatgccgc |
| CAR8- | | caggccccaagtccagctgcaagagtcaggacccggactggtgaagccgtctgaga |
| Soluble | | ctctctcactgacttgtaccgtcagcggcgtgtccctccccgactacggagtgtca |
| scFv-nt | | tggatccgccaacctcccgggaaagggcttgaatggattggtgtcatctggggttc |
| | | tgaaaccacctactaccagtcttccctgaagtccagggtgaccatcagcaaggata |
| | | attccaagaaccaggtcagccttaagctgtcatctgtgaccgctgctgacaccgcc |
| | | gtgtattactgcgccaagcactactattacggaggaagctacgctatggactattg |
| | | gggacagggcactctcgtgactgtgagcagcggcggtggagggtctggaggtggag |
| | | gatccggtggtggtgggtcaggcggaggagggagcgagattgtgatgactcagtca |
| | | ccagccaccctttctctttcacccggcgagagagcaaccctgagctgtagagccag |
| | | ccaggacatttctaagtacctcaactggtatcagcaaaaaccggggcaggcccctc |
| | | gcctcctgatctaccatacctcacgccttcactctggtatccccgctcggtttagc |
| | | ggatcaggatctggtaccgactacactctgaccatttccagcctgcagccagaaga |
| | | tttcgcagtgtatttctgccagcagggcaatacccttccttacaccttcggtcagg |
| | | gaaccaagctcgaaatcaagcaccatcaccatcatcatcaccac |
| 100798 | 80 | MALPVTALLLPLALLLHAARPqvqlqesgpglvkpsetlsltctvsgvslpdygvs |
| CAR8- | | wirqppgkglewigviwgsettyyqsslksrvtiskdnsknqvslklssvtaadta |
| Soluble | | vyycakhyyyggsyamdywgqgtlvtvssggggsggggsggggsggggseivmtqs |
| scFv-aa | | patlslspgeratlscrasqdiskylnwyqqkpgqaprlliyhtsrlhsgiparfs |
| | | gsgsgtdytltisslqpedfavyfcqqgntlpytfgqgtkleikhhhhhhhh |
| 104882 | 92 | atggctctgcccgtgaccgcactcctcctgccactggctctgctgcttcacgccgc |
| CAR8- | | tcgcccacaagtccagcttcaagaatcagggcctggtctggtgaagccatctgaga |
| Full-nt | | ctctgtccctcacttgcaccgtgagcggagtgtccctcccagactacggagtgagc |
| | | tggattagacagcctcccggaaagggactggagtggatcggagtgatttggggtag |
| | | cgaaaccacttactatcaatcttccctgaagtcacgggtcaccatttcaaaggata |
| | | actcaaagaatcaagtgagcctcaagctctcatcagtcaccgccgctgacaccgcc |
| | | gtgtattactgtgccaagcattactactatggagggtcctacgccatggactactg |
| | | gggccagggaactctggtcactgtgtcatctggtggaggaggtagcggaggaggcg |
| | | ggagcggtggaggtggctccggaggcggtgggtcagaaatcgtgatgacccagagc |
| | | cctgcaaccctgtccctttctcccggggaacgggctaccctttcttgtcgggcatc |
| | | acaagatatctcaaaatacctcaattggtatcaacagaagccgggacaggccccta |
| | | ggcttcttatctaccacacctctcgcctgcatagcgggattcccgcacgctttagc |
| | | gggtctggaagcgggaccgactacactctgaccatctcatctctccagcccgagga |
| | | cttcgccgtctacttctgccagcagggtaacaccctgccgtacaccttcggccagg |
| | | gcaccaagcttgagatcaaaaccactactcccgctccaaggccacccacccctgcc |
| | | ccgaccatcgcctctcagccgctttccctgcgtccggaggcatgtagacccgcagc |
| | | tggtggggccgtgcatacccggggtcttgacttcgcctgcgatatctacatttggg |
| | | cccctctggctggtacttgcggggtcctgctgctttcactcgtgatcactctttac |
| | | tgtaagcgcggtcggaagaagctgctgtacatctttaagcaacccttcatgaggcc |
| | | tgtgcagactactcaagaggaggacggctgttcatgccggttcccagaggaggagg |
| | | aaggcggctgcgaactgcgcgtgaaattcagccgcagcgcagatgctccagcctac |
| | | aagcaggggcagaaccagctctacaacgaactcaatcttggtcggagagaggagta |
| | | cgacgtgctggacaagcggagaggacgggacccagaaatgggcgggaagccgcgca |
| | | gaaagaatccccaagagggcctgtacaacgagctccaaaaggataagatggcagaa |
| | | gcctatagcgagattggtatgaaaggggaacgcagaagaggcaaaggccacgacgg |
| | | actgtaccagggactcagcaccgccaccaaggacacctatgacgctcttcacatgc |
| | | aggccctgccgcctcgg |
| 104882 | 38 | MALPVTALLLPLALLLHAARPqvqlqesgpglvkpsetlsltctvsgvslpdygvs |
| CAR8- | | wirqppgkglewigviwgsettyyqsslksrvtiskdnsknqvslklssvtaadta |
| Full-aa | | vyycakhyyyggsyamdywgqgtlvtvssggggsggggsggggsggggseivmtqs |
| | | patlslspgeratlscrasqdiskylnwyqqkpgqaprlliyhtsrlhsgiparfs |
| | | gsgsgtdytltisslqpedfavyfcqqgntlpytfgqgtkleiktttpaprpptpa |
| | | ptiasqplslrpeacrpaaggavhtrgldfacdiyiwaplagtcgvlllslvitly |
| | | ckrgrkkllyifkqpfmrpvqttqeedgcscrfpeeeeggcelrvkfsrsadapay |
| | | kqgqnqlynelnlgrreeydvldkrrgrdpemggkprrknpqeglynelqkdkmae |
| | | ayseigmkgerrrgkghdglyqglstatkdtydalhmqalppr |

CAR9

| | | |
|---|---|---|
| CAR9 scFv | 9 | eivmtqspatlslspgeratlscrasqdiskylnwyqqkpgqaprlliyhtsrlhs |
| domain | | giparfsgsgsgtdytltisslqpedfavyfcqqgntlpytfgqgtkleikggggs |
| | | ggggsggggsggggsqvqlqesgpglvkpsetlsltctvsgvslpdygvswirqpp |
| | | gkglewigviwgsettyynsslksrvtiskdnsknqvslklssvtaadtavyycak |
| | | hyyyggsyamdywgqgtlvtvss |
| 99789 | 69 | atggccctcccagtgaccgctctgctgctgcctctcgcacttcttctccatgccgc |
| CAR9- | | tcggcctgagatcgtcatgacccaaagccccgctaccctgtccctgtcacccggcg |
| Soluble | | agagggcaaccctttcatgcagggccagccaggacatttctaagtacctcaactgg |
| scFv-nt | | tatcagcagaagccagggcaggctcctcgcctgctgatctaccacaccagccgcct |
| | | ccacagcggtatccccgccagattttccgggagcgggtctggaaccgactacaccc |
| | | tcaccatctcttctctgcagcccgaggatttcgccgtctatttctgccagcagggg |
| | | aatactctgccgtacaccttcggtcaaggtaccaagctggaaatcaagggaggcgg |
| | | aggatcaggcggtggcggaagcggaggaggtggctccggaggaggaggttcccaag |
| | | tgcagcttcaagaatcaggacccggacttgtgaagccatcagaaaccctctccctg |
| | | acttgtaccgtgtccggtgtgagcctccccgactacggagtctcttggattcgcca |
| | | gcctccggggaagggtcttgaatggattggggtgatttggggatcagagactactt |
| | | actacaattcatcacttaagtcacgggtcaccatcagcaaagataatagcaagaac |
| | | caagtgtcacttaagctgtcatctgtgaccgccgctgacaccgccgtgtactattg |
| | | tgccaaacattactattacggagggtcttatgctatggactactggggacagggga |
| | | ccctggtgactgtctctagccatcaccatcaccaccatcatcac |
| 99789 | 81 | MALPVTALLLPLALLLHAARPeivmtqspatlslspgeratlscrasqdiskylnw |
| CAR9- | | yqqkpgqaprlliyhtsrlhsgiparfsgsgsgtdytltisslqpedfavyfcqqg |
| Soluble | | ntlpytfgqgtkleikggggsggggsggggsggggsqvqlqesgpglvkpsetlsl |
| scFv-aa | | tctvsgvslpdygvswirqppgkglewigviwgsettyynsslksrvtiskdnskn |
| | | qvslklssvtaadtavyycakhyyyggsyamdywgqgtlvtvsshhhhhhhh |
| 105974 | 93 | atggccctccctgtcaccgccctgctgcttccgctggctcttctgctccacgccgc |
| CAR9- | | tcggcccgaaattgtgatgacccagtcacccgccactcttagcctttcacccggtg |
| Full-nt | | agcgcgcaaccctgtcttgcagagcctcccaagacatctcaaaataccttaattgg |
| | | tatcaacagaagcccggacaggctcctcgccttctgatctaccacaccagccggct |
| | | ccattctggaatccctgccaggttcagcggtagcggatctgggaccgactacaccc |
| | | tcactatcagctcactgcagccagaggacttcgctgtctatttctgtcagcaaggg |
| | | aacaccctgccctacacctttggacagggcaccaagctcgagattaaaggtggagg |
| | | tggcagcggaggaggtgggtccggcggtggaggaagcggaggcggtgggagccagg |
| | | tccaactccaagaaagcggaccgggtcttgtgaagccatcagaaactctttcactg |
| | | acttgtactgtgagcggagtgtctctccccgattacggggtgtcttggatcagaca |
| | | gccaccggggaagggtctggaatggattggagtgatttggggctctgagactactt |
| | | actacaactcatccctcaagtcacgcgtcaccatctcaaaggacaactctaagaat |
| | | caggtgtcactgaaactgtcatctgtgaccgcagccgacaccgccgtgtactattg |
| | | cgctaagcattactattatggcgggagctacgcaatggattactggggacagggta |
| | | ctctggtcaccgtgtccagcaccactaccccagcaccgaggccacccaccccggct |
| | | cctaccatcgcctcccagcctctgtccctgcgtccggaggcatgtagacccgcagc |
| | | tggtggggccgtgcatacccggggtcttgacttcgcctgcgatatctacatttggg |
| | | cccctctggctggtacttgcggggtcctgctgctttcactcgtgatcactctttac |
| | | tgtaagcgcggtcggaagaagctgctgtacatctttaagcaacccttcatgaggcc |
| | | tgtgcagactactcaagaggaggacggctgttcatgccggttcccagaggaggagg |
| | | aaggcggctgcgaactgcgcgtgaaattcagccgcagcgcagatgctccagcctac |
| | | aagcaggggcagaaccagctctacaacgaactcaatcttggtcggagagaggagta |
| | | cgacgtgctggacaagcggagaggacgggacccagaaatgggcgggaagccgcgca |
| | | gaaagaatccccaagagggcctgtacaacgagctccaaaaggataagatggcagaa |
| | | gcctatagcgagattggtatgaaaggggaacgcagaagaggcaaaggccacgacgg |
| | | actgtaccagggactcagcaccgccaccaaggacacctatgacgctcttcacatgc |
| | | aggccctgccgcctcgg |
| 105974 | 39 | MALPVTALLLPLALLLHAARPeivmtqspatlslspgeratlscrasqdiskylnw |
| CAR9- | | yqqkpgqaprlliyhtsrlhsgiparfsgsgsgtdytltisslqpedfavyfcqqg |
| Full-aa | | ntlpytfgqgtkleikggggsggggsggggsggggsqvqlqesgpglvkpsetlsl |
| | | tctvsgvslpdygvswirqppgkglewigviwgsettyynsslksrvtiskdnskn |
| | | qvslklssvtaadtavyycakhyyyggsyamdywgqgtlvtvsstttpaprpptpa |
| | | ptiasqplslrpeacrpaaggavhtrgldfacdiyiwaplagtcgvlllslvitly |
| | | ckrgrkkllyifkqpfmrpvqttqeedgcscrfpeeeeggcelrvkfsrsadapay |
| | | kqgqnqlynelnlgrreeydvldkrrgrdpemggkprrknpqeglynelqkdkmae |
| | | ayseigmkgerrrgkghdglyqglstatkdtydalhmqalppr |

CAR10

| | | |
|---|---|---|
| CAR10 | 10 | qvqlqesgpglvkpsetlsltctvsgvslpdygvswirqppgkglewigviwgset |
| scFv | | tyynsslksrvtiskdnsknqvslklssvtaadtavyycakhyyyggsyamdywgq |
| domain | | gtlvtvssggggsggggsggggsggggseivmtqspatlslspgeratlscrasqd |
| | | iskylnwyqqkpgqaprlliyhtsrlhsgiparfsgsgsgtdytltisslqpedfa |
| | | vyfcqqgntlpytfgqgtkleik |
| 100796 | 70 | atggcactgcctgtcactgccctcctgctgcctctggccctccttctgcatgccgc |
| CAR10- | | caggccccaagtccagctgcaagagtcaggacccggactggtgaagccgtctgaga |
| Soluble | | ctctctcactgacttgtaccgtcagcggcgtgtccctccccgactacggagtgtca |
| scFv-nt | | tggatccgccaacctcccgggaaagggcttgaatggattggtgtcatctggggttc |
| | | tgaaaccacctactacaactcttccctgaagtccagggtgaccatcagcaaggata |
| | | attccaagaaccaggtcagccttaagctgtcatctgtgaccgctgctgacaccgcc |
| | | gtgtattactgcgccaagcactactattacggaggaagctacgctatggactattg |
| | | gggacagggcactctcgtgactgtgagcagcggcggtggagggtctggaggtggag |
| | | gatccggtggtggtgggtcaggcggaggagggagcgagattgtgatgactcagtca |
| | | ccagccaccctttctctttcacccggcgagagagcaaccctgagctgtagagccag |
| | | ccaggacatttctaagtacctcaactggtatcagcaaaaaccggggcaggcccctc |
| | | gcctcctgatctaccatacctcacgccttcactctggtatccccgctcggtttagc |
| | | ggatcaggatctggtaccgactacactctgaccatttccagcctgcagccagaaga |
| | | tttcgcagtgtatttctgccagcagggcaatacccttccttacaccttcggtcagg |
| | | gaaccaagctcgaaatcaagcaccatcaccatcatcaccaccat |
| 100796 | 82 | MALPVTALLLPLALLLHAARPqvqlqesgpglvkpsetlsltctvsgvslpdygvs |
| CAR10- | | wirqppgkglewigviwgsettyynsslksrvtiskdnsknqvslklssvtaadta |
| Soluble | | vyycakhyyyggsyamdywgqgtlvtvssggggsggggsggggsggggseivmtqs |
| scFv-aa | | patlslspgeratlscrasqdiskylnwyqqkpgqaprlliyhtsrlhsgiparfs |
| | | gsgsgtdytltisslqpedfavyfcqqgntlpytfgqgtkleikhhhhhhhh |
| 105975 | 94 | atggccctccctgtcaccgccctgctgcttccgctggctcttctgctccacgccgc |
| CAR10 | | tcggcccgaaattgtgatgacccagtcacccgccactcttagcctttcacccggtg |
| Full-nt | | agcgcgcaaccctgtcttgcagagcctcccaagacatctcaaaataccttaattgg |
| | | tatcaacagaagcccggacaggctcctcgccttctgatctaccacaccagccggct |
| | | ccattctggaatccctgccaggttcagcggtagcggatctgggaccgactacaccc |
| | | tcactatcagctcactgcagccagaggacttcgctgtctatttctgtcagcaaggg |
| | | aacaccctgccctacacctttggacagggcaccaagctcgagattaaaggtggagg |
| | | tggcagcggaggaggtgggtccggcggtggaggaagcggaggcggtgggagccagg |
| | | tccaactccaagaaagcggaccgggtcttgtgaagccatcagaaactctttcactg |
| | | acttgtactgtgagcggagtgtctctccccgattacggggtgtcttggatcagaca |
| | | gccaccggggaagggtctggaatggattggagtgatttggggctctgagactactt |
| | | actacaactcatccctcaagtcacgcgtcaccatctcaaaggacaactctaagaat |
| | | caggtgtcactgaaactgtcatctgtgaccgcagccgacaccgccgtgtactattg |
| | | cgctaagcattactattatggcgggagctacgcaatggattactggggacagggta |
| | | ctctggtcaccgtgtccagcaccactaccccagcaccgaggccacccaccccggct |
| | | cctaccatcgcctcccagcctctgtccctgcgtccggaggcatgtagacccgcagc |
| | | tggtggggccgtgcatacccggggtcttgacttcgcctgcgatatctacatttggg |
| | | cccctctggctggtacttgcggggtcctgctgctttcactcgtgatcactctttac |
| | | tgtaagcgcggtcggaagaagctgctgtacatctttaagcaacccttcatgaggcc |
| | | tgtgcagactactcaagaggaggacggctgttcatgccggttcccagaggaggagg |
| | | aaggcggctgcgaactgcgcgtgaaattcagccgcagcgcagatgctccagcctac |
| | | aagcaggggcagaaccagctctacaacgaactcaatcttggtcggagagaggagta |
| | | cgacgtgctggacaagcggagaggacgggacccagaaatgggcgggaagccgcgca |
| | | gaaagaatccccaagagggcctgtacaacgagctccaaaaggataagatggcagaa |
| | | gcctatagcgagattggtatgaaaggggaacgcagaagaggcaaaggccacgacgg |
| | | actgtaccagggactcagcaccgccaccaaggacacctatgacgctcttcacatgc |
| | | aggccctgccgcctcgg |
| 105975 | 40 | MALPVTALLLPLALLLHAARPEIVMTQSPATLSLSPGERATLSCRASQDISKYLNW |
| CAR10 | | YQQKPGQAPRLLIYHTSRLHSGIPARFSGSGSGTDYTLTISSLQPEDFAVYFCQQG |
| Full-aa | | NTLPYTFGQGTKLEIKGGGGSGGGGSGGGGSGGGGSQVQLQESGPGLVKPSETLSL |
| | | TCTVSGVSLPDYGVSWIRQPPGKGLEWIGVIWGSETTYYNSSLKSRVTISKDNSKN |
| | | QVSLKLSSVTAADTAVYYCAKHYYYGGSYAMDYWGQGTLVTVSSTTTPAPRPPTPA |
| | | PTIASQPLSLRPEACRPAAGGAVHTRGLDFACDIYIWAPLAGTCGVLLLSLVITLY |
| | | CKRGRKKLLYIFKQPFMRPVQTTQEEDGCSCRFPEEEEGGCELRVKFSRSADAPAY |
| | | KQGQNQLYNELNLGRREEYDVLDKRRGRDPEMGGKPRRKNPQEGLYNELQKDKMAE |
| | | AYSEIGMKGERRRGKGHDGLYQGLSTATKDTYDALHMQALPPR |

CAR11

| | | |
|---|---|---|
| CAR11 | 11 | eivmtqspatlslspgeratlscrasqdiskylnwyqqkpgqaprlliyhtsrlhs |
| scFv | | giparfsgsgsgtdytltisslqpedfavyfcqqgntlpytfgqgtkleikggggs |
| domain | | ggggsggggsqvqlqesgpglvkpsetlsltctvsgvslpdygvswirqppgkgle |
| | | wigviwgsettyynsslksrvtiskdnsknqvslklssvtaadtavyycakhyyyg |
| | | gsyamdywgqgtlvtvss |
| 103101 | 71 | Atggccctccctgtcaccgccctgctgcttccgctggctcttctgctccacgccgc |
| CAR11- | | tcggcccgaaattgtgatgacccagtcacccgccactcttagcctttcacccggtg |
| Soluble | | agcgcgcaaccctgtcttgcagagcctcccaagacatctcaaaataccttaattgg |
| scFv-nt | | tatcaacagaagcccggacaggctcctcgccttctgatctaccacaccagccggct |
| | | ccattctggaatccctgccaggttcagcggtagcggatctgggaccgactacaccc |
| | | tcactatcagctcactgcagccagaggacttcgctgtctatttctgtcagcaaggg |
| | | aacaccctgccctacacctttggacagggcaccaagctcgagattaaaggtggagg |
| | | tggcagcggaggaggtgggtccggcggtggaggaagccaggtccaactccaagaaa |
| | | gcggaccgggtcttgtgaagccatcagaaactctttcactgacttgtactgtgagc |
| | | ggagtgtctctccccgattacggggtgtcttggatcagacagccaccggggaaggg |
| | | tctggaatggattggagtgatttggggctctgagactacttactacaattcatccc |
| | | tcaagtcacgcgtcaccatctcaaaggacaactctaagaatcaggtgtcactgaaa |
| | | ctgtcatctgtgaccgcagccgacaccgccgtgtactattgcgctaagcattacta |
| | | ttatggcgggagctacgcaatggattactggggacagggtactctggtcaccgtgt |
| | | ccagccaccaccatcatcaccatcaccat |
| 103101 | 83 | MALPVTALLLPLALLLHAARPeivmtqspatlslspgeratlscrasqdiskylnw |
| CAR11- | | yqqkpgqaprlliyhtsrlhsgiparfsgsgsgtdytltisslqpedfavyfcqqg |
| Soluble | | ntlpytfgqgtkleikggggsggggsggggsqvqlqesgpglvkpsetlsltctvs |
| scFv-aa | | gvslpdygvswirqppgkglewigviwgsettyynsslksrvtiskdnsknqvslk |
| | | lssvtaadtavyycakhyyyggsyamdywgqgtlvtvsshhhhhhhh |
| 105976 | 95 | atggctctgcccgtgaccgcactcctcctgccactggctctgctgcttcacgccgc |
| CAR11 | | tcgcccacaagtccagcttcaagaatcagggcctggtctggtgaagccatctgaga |
| Full-nt | | ctctgtccctcacttgcaccgtgagcggagtgtccctcccagactacggagtgagc |
| | | tggattagacagcctcccggaaagggactggagtggatcggagtgatttggggtag |
| | | cgaaaccacttactataactcttccctgaagtcacgggtcaccatttcaaaggata |
| | | actcaaagaatcaagtgagcctcaagctctcatcagtcaccgccgctgacaccgcc |
| | | gtgtattactgtgccaagcattactactatggagggtcctacgccatggactactg |
| | | gggccagggaactctggtcactgtgtcatctggtggaggaggtagcggaggaggcg |
| | | ggagcggtggaggtggctccggaggtggcggaagcgaaatcgtgatgacccagagc |
| | | cctgcaaccctgtccctttctcccggggaacgggctaccctttcttgtcgggcatc |
| | | acaagatatctcaaaatacctcaattggtatcaacagaagccgggacaggccccta |
| | | ggcttcttatctaccacacctctcgcctgcatagcgggattcccgcacgctttagc |
| | | gggtctggaagcgggaccgactacactctgaccatctcatctctccagcccgagga |
| | | cttcgccgtctacttctgccagcagggtaacaccctgccgtacaccttcggccagg |
| | | gcaccaagcttgagatcaaaaccactactcccgctccaaggccacccacccctgcc |
| | | ccgaccatcgcctctcagccgctttccctgcgtccggaggcatgtagacccgcagc |
| | | tggtggggccgtgcatacccggggtcttgacttcgcctgcgatatctacatttggg |
| | | cccctctggctggtacttgcggggtcctgctgctttcactcgtgatcactctttac |
| | | tgtaagcgcggtcggaagaagctgctgtacatctttaagcaacccttcatgaggcc |
| | | tgtgcagactactcaagaggaggacggctgttcatgccggttcccagaggaggagg |
| | | aaggcggctgcgaactgcgcgtgaaattcagccgcagcgcagatgctccagcctac |
| | | aagcaggggcagaaccagctctacaacgaactcaatcttggtcggagagaggagta |
| | | cgacgtgctggacaagcggagaggacgggacccagaaatgggcgggaagccgcgca |
| | | gaaagaatccccaagagggcctgtacaacgagctccaaaaggataagatggcagaa |
| | | gcctatagcgagattggtatgaaaggggaacgcagaagaggcaaaggccacgacgg |
| | | actgtaccagggactcagcaccgccaccaaggacacctatgacgctcttcacatgc |
| | | aggccctgccgcctcgg |
| 105976 | 41 | MALPVTALLLPLALLLHAARPQVQLQESGPGLVKPSETLSLTCTVSGVSLPDYGVS |
| CAR11 | | WIRQPPGKGLEWIGVIWGSETTYYNSSLKSRVTISKDNSKNQVSLKLSSVTAADTA |
| Full-aa | | VYYCAKHYYYGGSYAMDYWGQGTLVTVSSGGGGSGGGGSGGGGSGGGGSEIVMTQS |
| | | PATLSLSPGERATLSCRASQDISKYLNWYQQKPGQAPRLLIYHTSRLHSGIPARFS |
| | | GSGSGTDYTLTISSLQPEDFAVYFCQQGNTLPYTFGQGTKLEIKTTTPAPRPPTPA |
| | | PTIASQPLSLRPEACRPAAGGAVHTRGLDFACDIYIWAPLAGTCGVLLLSLVITLY |
| | | CKRGRKKLLYIFKQPFMRPVQTTQEEDGCSCRFPEEEEGGCELRVKFSRSADAPAY |
| | | KQGQNQLYNELNLGRREEYDVLDKRRGRDPEMGGKPRRKNPQEGLYNELQKDKMAE |
| | | AYSEIGMKGERRRGKGHDGLYQGLSTATKDTYDALHMQALPPR |

CAR12

| | | |
|---|---|---|
| CAR12 | 12 | qvqlqesgpglvkpsetlsltctvsgvslpdygvswirqppgkglewigviwgset |
| scFv | | tyynsslksrvtiskdnsknqvslklssvtaadtavyycakhyyyggsyamdywgq |
| domain | | gtlvtvssggggsggggsggggseivmtqspatlslspgeratlscrasqdiskyl |
| | | nwyqqkpgqaprlliyhtsrlhsgiparfsgsgsgtdytltisslqpedfavyfcq |
| | | qgntlpytfgqgtkleik |
| 103104 | 72 | atggctctgcccgtgaccgcactcctcctgccactggctctgctgcttcacgccgc |
| CAR12- | | tcgcccacaagtccagcttcaagaatcagggcctggtctggtgaagccatctgaga |
| Soluble | | ctctgtccctcacttgcaccgtgagcggagtgtccctcccagactacggagtgagc |
| scFv-nt | | tggattagacagcctcccggaaagggactggagtggatcggagtgatttggggtag |
| | | cgaaaccacttactataactcttccctgaagtcacgggtcaccatttcaaaggata |
| | | actcaaagaatcaagtgagcctcaagctctcatcagtcaccgccgctgacaccgcc |
| | | gtgtattactgtgccaagcattactactatggagggtcctacgccatggactactg |
| | | gggccagggaactctggtcactgtgtcatctggtggaggaggtagcggaggaggcg |
| | | ggagcggtggaggtggctccgaaatcgtgatgacccagagccctgcaaccctgtcc |
| | | ctttctcccggggaacgggctaccctttcttgtcgggcatcacaagatatctcaaa |
| | | atacctcaattggtatcaacagaagccgggacaggcccctaggcttcttatctacc |
| | | acacctctcgcctgcatagcgggattcccgcacgctttagcgggtctggaagcggg |
| | | accgactacactctgaccatctcatctctccagcccgaggacttcgccgtctactt |
| | | ctgccagcagggtaacaccctgccgtacaccttcggccagggcaccaagcttgaga |
| | | tcaaacatcaccaccatcatcaccatcac |
| 103104 | 84 | MALPVTALLLPLALLLHAARPqvqlqesgpglvkpsetlsltctvsgvslpdygvs |
| CAR12- | | wirqppgkglewigviwgsettyynsslksrvtiskdnsknqvslklssvtaadta |
| Soluble | | vyycakhyyyggsyamdywgqgtlvtvssggggsggggsggggseivmtqspatls |
| scFv-aa | | lspgeratlscrasqdiskylnwyqqkpgqaprlliyhtsrlhsgiparfsgsgsg |
| | | tdytltisslqpedfavyfcqqgntlpytfgqgtkleikhhhhhhhh |
| 105977 | 96 | atggccctccctgtcaccgccctgctgcttccgctggctcttctgctccacgccgc |
| CAR12- | | tcggcccgaaattgtgatgacccagtcacccgccactcttagcctttcacccggtg |
| Full-nt | | agcgcgcaaccctgtcttgcagagcctcccaagacatctcaaaataccttaattgg |
| | | tatcaacagaagcccggacaggctcctcgccttctgatctaccacaccagccggct |
| | | ccattctggaatccctgccaggttcagcggtagcggatctgggaccgactacaccc |
| | | tcactatcagctcactgcagccagaggacttcgctgtctatttctgtcagcaaggg |
| | | aacaccctgccctacacctttggacagggcaccaagctcgagattaaaggtggagg |
| | | tggcagcggaggaggtgggtccggcggtggaggaagccaggtccaactccaagaaa |
| | | gcggaccgggtcttgtgaagccatcagaaactctttcactgacttgtactgtgagc |
| | | ggagtgtctctccccgattacggggtgtcttggatcagacagccaccggggaaggg |
| | | tctggaatggattggagtgatttggggctctgagactacttactacaactcatccc |
| | | tcaagtcacgcgtcaccatctcaaaggacaactctaagaatcaggtgtcactgaaa |
| | | ctgtcatctgtgaccgcagccgacaccgccgtgtactattgcgctaagcattacta |
| | | ttatggcgggagctacgcaatggattactggggacagggtactctggtcaccgtgt |
| | | ccagcaccactaccccagcaccgaggccacccaccccggctcctaccatcgcctcc |
| | | cagcctctgtccctgcgtccggaggcatgtagacccgcagctggtggggccgtgca |
| | | tacccggggtcttgacttcgcctgcgatatctacatttgggcccctctggctggta |
| | | cttgcggggtcctgctgctttcactcgtgatcactctttactgtaagcgcggtcgg |
| | | aagaagctgctgtacatctttaagcaacccttcatgaggcctgtgcagactactca |
| | | agaggaggacggctgttcatgccggttcccagaggaggaggaaggcggctgcgaac |
| | | tgcgcgtgaaattcagccgcagcgcagatgctccagcctacaagcaggggcagaac |
| | | cagctctacaacgaactcaatcttggtcggagagaggagtacgacgtgctggacaa |
| | | gcggagaggacgggacccagaaatgggcgggaagccgcgcagaaagaatccccaag |
| | | agggcctgtacaacgagctccaaaaggataagatggcagaagcctatagcgagatt |
| | | ggtatgaaaggggaacgcagaagaggcaaaggccacgacggactgtaccagggact |
| | | cagcaccgccaccaaggacacctatgacgctcttcacatgcaggccctgccgcctc |
| | | gg |
| 105977 | 42 | MALPVTALLLPLALLLHAARPEIVMTQSPATLSLSPGERATLSCRASQDISKYLNW |
| CAR12- | | YQQKPGQAPRLLIYHTSRLHSGIPARFSGSGSGTDYTLTISSLQPEDFAVYFCQQG |
| Full-aa | | NTLPYTFGQGTKLEIKGGGGSGGGGSGGGGSQVQLQESGPGLVKPSETLSLTCTVS |
| | | GVSLPDYGVSWIRQPPGKGLEWIGVIWGSETTYYNSSLKSRVTISKDNSKNQVSLK |
| | | LSSVTAADTAVYYCAKHYYYGGSYAMDYWGQGTLVTVSSTTTPAPRPPTPAPTIAS |
| | | QPLSLRPEACRPAAGGAVHTRGLDFACDIYIWAPLAGTCGVLLLSLVITLYCKRGR |
| | | KKLLYIFKQPFMRPVQTTQEEDGCSCRFPEEEEGGCELRVKFSRSADAPAYKQGQN |
| | | QLYNELNLGRREEYDVLDKRRGRDPEMGGKPRRKNPQEGLYNELQKDKMAEAYSEI |
| | | GMKGERRRGKGHDGLYQGLSTATKDTYDALHMQALPPR |

TABLE 3
Murine CD19 CAR Constructs
CTL019

| | | |
|---|---|---|
| CTL019- | 97 | Atggccctgcccgtcaccgctctgctgctgccccttgctctgcttcttcatgcagc |
| Soluble | | aaggccggacatccagatgacccaaaccacctcatccctctctgcctctcttggag |
| scFv-Histag- | | acagggtgaccatttcttgtcgcgccagccaggacatcagcaagtatctgaactgg |
| nt | | tatcagcagaagccggacggaaccgtgaagctcctgatctaccatacctctcgcct |
| | | gcatagcggcgtgccctcacgcttctctggaagcggatcaggaaccgattattctc |
| | | tcactatttcaaatcttgagcaggaagatattgccacctatttctgccagcagggt |
| | | aataccctgccctacaccttcggaggagggaccaagctcgaaatcaccggtggagg |
| | | aggcagcggcggtggagggtctggtggaggtggttctgaggtgaagctgcaagaat |
| | | caggccctggacttgtggccccttcacagtccctgagcgtgacttgcaccgtgtcc |
| | | ggagtctccctgcccgactacggagtgtcatggatcagacaacctccacggaaagg |
| | | actggaatggctcggtgtcatctggggtagcgaaactacttactacaattcagccc |
| | | tcaaaagcaggctgactattatcaaggacaacagcaagtcccaagtctttcttaag |
| | | atgaactcactccagactgacgacaccgcaatctactattgtgctaagcactacta |
| | | ctacggaggatcctacgctatggattactggggacaaggtacttccgtcactgtct |
| | | cttcacaccatcatcaccatcaccatcac |
| CTL019- | 98 | MALPVTALLLPLALLLHAARPdiqmtqttsslsaslgdrvtiscrasqdiskylnw |
| Soluble | | yqqkpdgtvklliyhtsrlhsgvpsrfsgsgsgtdysltisnleqediatyfcqqg |
| scFv-Histag- | | ntlpytfgggtkleitggggsggggsggggsevklqesgpglvapsqslsvtctvs |
| aa | | gvslpdygvswirqpprkglewlgviwgsettyynsalksrltiikdnsksqvflk |
| | | mnslqtddtaiyycakhyyyggsyamdywgqgtsvtvsshhhhhhhh |
| CTL019 | 99 | atggccttaccagtgaccgccttgctcctgccgctggccttgctgctccacgccgc |
| Full-nt | | caggccggacatccagatgacacagactacatcctccctgtctgcctctctgggag |
| | | acagagtcaccatcagttgcagggcaagtcaggacattagtaaatatttaaattgg |
| | | tatcagcagaaaccagatggaactgttaaactcctgatctaccatacatcaagatt |
| | | acactcaggagtcccatcaaggttcagtggcagtgggtctggaacagattattctc |
| | | tcaccattagcaacctggagcaagaagatattgccacttacttttgccaacagggt |
| | | aatacgcttccgtacacgttcggaggggggaccaagctggagatcacaggtggcgg |
| | | tggctcgggcggtggtgggtcgggtggcggcggatctgaggtgaaactgcaggagt |
| | | caggacctggcctggtggcgccctcacagagcctgtccgtcacatgcactgtctca |
| | | ggggtctcattacccgactatggtgtaagctggattcgccagcctccacgaaaggg |
| | | tctggagtggctgggagtaatatggggtagtgaaaccacatactataattcagctc |
| | | tcaaatccagactgaccatcatcaaggacaactccaagagccaagttttcttaaaa |
| | | atgaacagtctgcaaactgatgacacagccatttactactgtgccaaacattatta |
| | | ctacggtggtagctatgctatggactactggggccaaggaacctcagtcaccgtct |
| | | cctcaaccacgacgccagcgccgcgaccaccaacaccggcgcccaccatcgcgtcg |
| | | cagcccctgtccctgcgcccagaggcgtgccggccagcggcggggggcgcagtgca |
| | | cacgagggggctggacttcgcctgtgatatctacatctgggcgcccttggccggga |
| | | cttgtggggtccttctcctgtcactggttatcaccctttactgcaaacggggcaga |
| | | aagaaactcctgtatatattcaaacaaccatttatgagaccagtacaaactactca |
| | | agaggaagatggctgtagctgccgatttccagaagaagaagaaggaggatgtgaac |
| | | tgagagtgaagttcagcaggagcgcagacgcccccgcgtacaagcagggccagaac |
| | | cagctctataacgagctcaatctaggacgaagagaggagtacgatgttttggacaa |
| | | gagacgtggccgggaccctgagatggggggaaagccgagaaggaagaaccctcagg |
| | | aaggcctgtacaatgaactgcagaaagataagatggcggaggcctacagtgagatt |
| | | gggatgaaaggcgagcgccggaggggcaaggggcacgatggcctttaccagggtct |
| | | cagtacagccaccaaggacacctacgacgcccttcacatgcaggccctgccccctc |
| | | gc |
| CTL019 | 58 | MALPVTALLLPLALLLHAARPdiqmtqttsslsaslgdrvtiscrasqdiskylnw |
| Full-aa | | yqqkpdgtvklliyhtsrlhsgvpsrfsgsgsgtdysltisnleqediatyfcqqg |
| | | ntlpytfgggtkleitggggsggggsggggsevklqesgpglvapsqslsvtctvs |
| | | gvslpdygvswirqpprkglewlgviwgsettyynsalksrltiikdnsksqvflk |
| | | mnslqtddtaiyycakhyyyggsyamdywgqgtsvtvsstttpaprpptpaptias |
| | | qplslrpeacrpaaggavhtrgldfacdiyiwaplagtcgvlllslvitlyckrgr |
| | | kkllyifkqpfmrpvqttqeedgcscrfpeeeeggcelrvkfsrsadapaykqgqn |
| | | qlynelnlgrreeydvldkrrgrdpemggkprrknpqeglynelqkdkmaeaysei |
| | | gmkgerrrgkghdglyqglstatkdtydalhmqalppr |
| CTL019 | 59 | Diqmtqttsslsaslgdrvtiscrasqdiskylnwyqqkpdgtvklliyhtsrlhs |
| scFv | | gvpsrfsgsgsgtdysltisnleqediatyfcqqgntlpytfgggtkleitggggs |
| domain | | ggggsggggsevklqesgpglvapsqslsvtctvsgvslpdygvswirqpprkgle |
| | | wlgviwgsettyynsalksrltiikdnsksqvflkmnslqtddtaiyycakhyyyg |
| | | gsyamdywgqgtsvtvss |
| mCAR1 | 109 | QVQLLESGAELVRPGSSVKISCKASGYAFSSYWMNWVKQRPGQGLEWIGQIYPGDG |
| scFv | | DTNYNGKFKGQATLTADKSSSTAYMQLSGLTSEDSAVYSCARKTISSVVDFYFDYW |
| | | GQGTTVTGGGSGGGSGGGSGGGSELVLTQSPKFMSTSVGDRVSVTCKASQNVGTNV |
| | | AWYQQKPGQSPKPLIYSATYRNSGVPDRFTGSGSGTDFTLTITNVQSKDLADYFCQ |
| | | YNRYPYTSFFFTKLEIKRRS |
| mCAR1 | 110 | QVQLLESGAELVRPGSSVKISCKASGYAFSSYWMNWVKQRPGQGLEWIGQIYPGDG |
| Full-aa | | DTNYNGKFKGQATLTADKSSSTAYMQLSGLTSEDSAVYSCARKTISSVVDFYFDYW |
| | | GQGTTVTGGGSGGGSGGGSGGGSELVLTQSPKFMSTSVGDRVSVTCKASQNVGTNV |
| | | AWYQQKPGQSPKPLIYSATYRNSGVPDRFTGSGSGTDFTLTITNVQSKDLADYFCQ |
| | | YNRYPYTSFFFTKLEIKRRSKIEVMYPPPYLDNEKSNGTIIHVKGKHLCPSPLFPG |
| | | PSKPFWVLVVVGGVLACYSLLVTVAFIIFWVRSKRSRLLHSDYMNMTPRRPGPTRK |
| | | HYQPYAPPRDFAAYRSRVKFSRSADAPAYQQGQNQLYNELNLGRREEYDVLDKRRG |
| | | RDPEMGGKPRRKNPQEGLYNELQKDKMAEAYSEIGMKGERRRGKGHDGLYQGLSTA |
| | | TKDTYDALHMQALPPR |
| mCAR2 | 111 | DIQMTQTTSSLSASLGDRVTISCRASQDISKYLNWYQQKPDGTVKLLIYHTSRLHS |
| scFv | | GVPSRFSGSGSGTDYSLTISNLEQEDIATYFCQQGNTLPYTFGGGTKLEITGSTSG |
| | | SGKPGSGEGSTKGEVKLQESGPGLVAPSQSLSVTCTVSGVSLPDYGVSWIRQPPRK |
| | | GLEWLGVIWGSETTYYNSALKSRLTIIKDNSKSQVFLKMNSLQTDDTAIYYCAKHY |
| | | YYGGSYAMDYWGQGTSVTVSSE |
| mCAR2 | 112 | DIQMTQTTSSLSASLGDRVTISCRASQDISKYLNWYQQKPDGTVKLLIYHTSRLHS |
| CAR-aa | | GVPSRFSGSGSGTDYSLTISNLEQEDIATYFCQQGNTLPYTFGGGTKLEITGSTSG |
| | | SGKPGSGEGSTKGEVKLQESGPGLVAPSQSLSVTCTVSGVSLPDYGVSWIRQPPRK |
| | | GLEWLGVIWGSETTYYNSALKSRLTIIKDNSKSQVFLKMNSLQTDDTAIY |
| | | YCAKHYYYGGSYAMDYWGQGTSVTVSSESKYGPPCPPCPMFWVLVVVGGVLACYSL |
| | | LVTVAFIIFWVKRGRKKLLYIFKQPFMRPVQTTQEEDGCSCRFEEEEGGCELRVKF |
| | | SRSADAPAYQQGQNQLYNELNLGRREEYDVLDKRRGRDPEMGGKPRRKNPQEGLYN |
| | | ELQKDKMAEAYSEIGMKGERRRGKGHDGLYQGLSTATKDTYDALHMQALPPRL |
| mCAR2 | 113 | DIQMTQTT SSLSASLGDR VTISCRASQD ISKYLNWYQQ KPDGTVKLLI |
| Full-aa | | YHTSRLHSGV PSRFSGSGSG TDYSLTISNL EQEDIATYFC QQGNTLPYTF |
| | | GGGTKLEITG STSGSGKPGS GEGSTKGEVK LQESGPGLVA PSQSLSVTCT |
| | | VSGVSLPDYG VSWIRQPPRK GLEWLGVIWG SETTYYNSAL KSRLTIIKDN |
| | | SKSQVFLKMN SLQTDDTAIY YCAKHYYYGG SYAMDYWGQG TSVTVSSESK |
| | | YGPPCPPCPM FWVLVVVGGV LACYSLLVTV |
| | | AFIIFWVKRG RKKLLYIFKQ PFMRPVQTTQ EEDGCSCRFE EEEGGCELRV |
| | | KFSRSADAPA YQQGQNQLYN ELNLGRREEY DVLDKRRGRD PEMGGKPRRK |
| | | NPQEGLYNEL QKDKMAEAYS EIGMKGERRR GKGHDGLYQG LSTATKDTYD |
| | | ALHMQALPPR LEGGGEGRGS LLTCGDVEEN PGPRMLLLVT SLLLCELPHP |
| | | AFLLIPRKVC NGIGIGEFKD SLSINATNIK HFKNCTSISG DLHILPVAFR |
| | | GDSFTHTPPL DPQELDILKT VKEITGFLLI QAWPENRTDL HAFENLEIIR |
| | | GRTKQHGQFS LAVVSLNITS LGLRSLKEIS DGDVIISGNK NLCYANTINW |
| | | KKLFGTSGQK TKIISNRGEN SCKATGQVCH ALCSPEGCWG PEPRDCVSCR |
| | | NVSRGRECVD KCNLLEGEPR EFVENSECIQ CHPECLPQAM NITCTGRGPD |
| | | NCIQCAHYID GPHCVKTCPA GVMGENNTLV WKYADAGHVC HLCHPNCTYG |
| | | CTGPGLEGCP TNGPKIPSIA TGMVGALLLL LVVALGIGLF M |
| mCAR3 | 114 | DIQMTQTTSSLSASLGDRVTISCRASQDISKYLNWYQQKPDGTVKLLIYHTSRLHS |
| scFv | | GVPSRFSGSGSGTDYSLTISNLEQEDIATYFCQQGNTLPYTFGGGTKLEITGSTSG |
| | | SGKPGSGEGSTKGEVKLQESGPGLVAPSQSLSVTCTVSGVSLPDYGVSWIRQPPRK |
| | | GLEWLGVIWGSETTYYNSALKSRLTIIKDNSKSQVFLKMNSLQTDDTAIYYCAKHY |
| | | YYGGSYAMDYWGQGTSVTVSS |
| mCAR3 | 115 | DIQMTQTTSSLSASLGDRVTISCRASQDISKYLNWYQQKPDGTVKLLIYHTSRLHS |
| Full-aa | | GVPSRFSGSGSGTDYSLTISNLEQEDIATYFCQQGNTLPYTFGGGTKLEITGSTSG |
| | | SGKPGSGEGSTKGEVKLQESGPGLVAPSQSLSVTCTVSGVSLPDYGVSWIRQPPRK |
| | | GLEWLGVIWGSETTYYNSALKSRLTIIKDNSKSQVFLKMNSLQTDDTAIYYCAKHY |
| | | YYGGSYAMDYWGQGTSVTVSSAAAIEVMYPPPYLDNEKSNGTIIHVKGKHLCPSPL |
| | | FPGPSKPFWVLVVVGGVLACYSLLVTVAFIIFWVRSKRSRLLHSDYMNMTPRRPGP |
| | | TRKHYQPYAPPRDFAAYRSRVKFSRSADAPAYQQGQNQLYNELNLGRREEYDVLDK |
| | | RRGRDPEMGGKPRRKNPQEGLYNELQKDKMAEAYSEIGMKGERRRGKGHDGLYQGL |
| | | STATKDTYDALHMQALPPR |

[1267] In some embodiments, the antigen binding domain comprises a HC CDR1, a HC CDR2, and a HC CDR3 of any heavy chain binding domain amino acid sequences listed in Table 2. In embodiments, the antigen binding domain further comprises a LC CDR1, a LC CDR2, and a LC CDR3. In embodiments, the antigen binding domain comprises a LC CDR1, a LC CDR2, and a LC CDR3 of any light chain binding domain amino acid sequences listed in Table 2.

[1268] In some embodiments, the antigen binding domain comprises one, two or all of LC CDR1, LC CDR2, and LC CDR3 of any light chain binding domain amino acid sequences listed in Table 2, and one, two or all of HC CDR1, HC CDR2, and HC CDR3 of any heavy chain binding domain amino acid sequences listed in Table 2.

[1269] In some embodiments, the CDRs are defined according to the Kabat numbering scheme, the Chothia numbering scheme, or a combination thereof.

[1270] The sequences of humanized CDR sequences of the scFv domains are shown in Table 4 for the heavy chain variable domains and in Table 5 for the light chain variable domains. “ID” stands for the respective SEQ ID NO for each CDR.

TABLE 4
Heavy Chain Variable Domain CDRs (Kabat)

| Candidate | FW | HCDR1 | ID | HCDR2 | ID | HCDR3 | ID |
|---|---|---|---|---|---|---|---|
| murine_CART19 | | GVSLPDYGVS | 19 | VIWGSETTYYNSALKS | 20 | HYYYGGSYAMDY | 24 |
| humanized_CART19 a | VH4 | GVSLPDYGVS | 19 | VIWGSETTYYSSSLKS | 21 | HYYYGGSYAMDY | 24 |
| humanized_CART19 b | VH4 | GVSLPDYGVS | 19 | VIWGSETTYYQSSLKS | 22 | HYYYGGSYAMDY | 24 |
| humanized_CART19 c | VH4 | GVSLPDYGVS | 19 | VIWGSETTYYNSSLKS | 23 | HYYYGGSYAMDY | 24 |

TABLE 5
Light Chain Variable Domain CDRs

| Candidate | FW | LCDR1 | ID | LCDR2 | ID | LCDR3 | ID |
|---|---|---|---|---|---|---|---|
| murine_CART19 | | RASQDISKYLN | 25 | HTSRLHS | 26 | QQGNTLPYT | 27 |
| humanized_CART19 a | VK3 | RASQDISKYLN | 25 | HTSRLHS | 26 | QQGNTLPYT | 27 |
| humanized_CART19 b | VK3 | RASQDISKYLN | 25 | HTSRLHS | 26 | QQGNTLPYT | 27 |
| humanized_CART19 c | VK3 | RASQDISKYLN | 25 | HTSRLHS | 26 | QQGNTLPYT | 27 |

[1271] The CAR scFv fragments were then cloned into lentiviral vectors to create a full length CAR construct in a single coding frame, and using the EF1 alpha promoter for expression (SEQ ID NO: 100).

EF1 alpha promoter
(SEQ ID NO: 100)
CGTGAGGCTCCGGTGCCCGTCAGTGGGCAGAGCGCACATCGCCCACAGTC
CCCGAGAAGTTGGGGGGAGGGGTCGGCAATTGAACCGGTGCCTAGAGAAG
GTGGCGCGGGGTAAACTGGGAAAGTGATGTCGTGTACTGGCTCCGCCTTT
TTCCCGAGGGTGGGGGAGAACCGTATATAAGTGCAGTAGTCGCCGTGAAC
GTTCTTTTTCGCAACGGGTTTGCCGCCAGAACACAGGTAAGTGCCGTGTG
TGGTTCCCGCGGGCCTGGCCTCTTTACGGGTTATGGCCCTTGCGTGCCTT
GAATTACTTCCACCTGGCTGCAGTACGTGATTCTTGATCCCGAGCTTCGG
GTTGGAAGTGGGTGGGAGAGTTCGAGGCCTTGCGCTTAAGGAGCCCCTTC
GCCTCGTGCTTGAGTTGAGGCCTGGCCTGGGCGCTGGGGCCGCCGCGTGC
GAATCTGGTGGCACCTTCGCGCCTGTCTCGCTGCTTTCGATAAGTCTCTA
GCCATTTAAAATTTTTGATGACCTGCTGCGACGCTTTTTTTCTGGCAAGA
TAGTCTTGTAAATGCGGGCCAAGATCTGCACACTGGTATTTCGGTTTTTG
GGGCCGCGGGCGGCGACGGGGCCCGTGCGTCCCAGCGCACATGTTCGGCG
AGGCGGGGCCTGCGAGCGCGGCCACCGAGAATCGGACGGGGGTAGTCTCA
AGCTGGCCGGCCTGCTCTGGTGCCTGGCCTCGCGCCGCCGTGTATCGCCC
CGCCCTGGGCGGCAAGGCTGGCCCGGTCGGCACCAGTTGCGTGAGCGGAA
AGATGGCCGCTTCCCGGCCCTGCTGCAGGGAGCTCAAAATGGAGGACGCG
GCGCTCGGGAGAGCGGGCGGGTGAGTCACCCACACAAAGGAAAAGGGCCT
TTCCGTCCTCAGCCGTCGCTTCATGTGACTCCACGGAGTACCGGGCGCCG
TCCAGGCACCTCGATTAGTTCTCGAGCTTTTGGAGTACGTCGTCTTTAGG
TTGGGGGGAGGGGTTTTATGCGATGGAGTTTCCCCACACTGAGTGGGTGG
AGACTGAAGTTAGGCCAGCTTGGCACTTGATGTAATTCTCCTTGGAATTT
GCCCTTTTTGAGTTTGGATCTTGGTTCATTCTCAAGCCTCAGACAGTGGT
TCAAAGTTTTTTTCTTCCATTTCAGGTGTCGTGA.

### CAR22 Constructs: Design and Function

[1272] Fully human anti-CD22 single chain variable fragments were isolated. Anti-CD22 ScFvs were cloned into lentiviral CAR expression vectors with the CD3zeta chain and the 4-1BB costimulatory molecule. CAR-containing plasmids were amplified by bacterial transformation in STBL3 cells, followed by Maxiprep using endotoxin-free Qiagen Plasmid Maki kit. Lentiviral supernatant was produced in 293T cells using standard techniques.

[1273] The sequences of the human CARs are provided below in Table 6A and 6B.

[1274] These clones all contained a Q/K residue change in the signal domain of the co-stimulatory domain derived from CD3zeta chain.

TABLE 6A
Human CD22 CAR Constructs

| Name | SEQ ID | Sequence |
|---|---|---|
| m971 NT | 200 | gtgcacgagtgggttacatcgaactggatctcaacagcggtaagatccttgagagttttcgccccg |
| | | aagaacgttttccaatgatgagcacttttaaagttctgctatgtggcgcggtattatcccgtattg |
| | | acgccgggcaagagcaactcggtcgccgcatacactattctcagaatgacttggttgagtactcac |
| | | cagtcacagaaaagcatcttacggatggcatgacagtaagagaattatgcagtgctgccataacca |
| | | tgagtgataacactgcggccaacttacttctgacaacgatcggaggaccgaaggagctaaccgctt |
| | | ttttgcacaacatgggggatcatgtaactcgccttgatcgttgggaaccggagctgaatgaagcca |
| | | taccaaacgacgagcgtgacaccacgatgcctgtagcaatggcaacaacgttgcgcaaactattaa |
| | | ctggcgaactacttactctagcttcccggcaacaattaatagactggatggaggcggataaagttg |
| | | caggaccacttctgcgctcggcccttccggctggctggtttattgctgataaatctggagccggtg |
| | | agcgtgggtctcgcggtatcattgcagcactggggccagatggtaagccctcccgtatcgtagtta |
| | | tctacacgacggggagtcaggcaactatggatgaacgaaatagacagatcgctgagataggtgcct |
| | | cactgattaagcattggtaactgtcagaccaagtttactcatatatactttagattgatttaaaac |
| | | ttcatttttaatttaaaaggatctaggtgaagatcctttttgataatctcatgaccaaaatccctt |
| | | aacgtgagttttcgttccactgagcgtcagaccccgtagaaaagatcaaaggatcttcttgagatc |
| | | ctttttttctgcgcgtaatctgctgcttgcaaacaaaaaaaccaccgctaccagcggtggtttgtt |
| | | tgccggatcaagagctaccaactctttttccgaaggtaactggcttcagcagagcgcagataccaa |
| | | atactgttcttctagtgtagccgtagttaggccaccacttcaagaactctgtagcaccgcctacat |
| | | acctcgctctgctaatcctgttaccagtggctgctgccagtggcgataagtcgtgtcttaccgggt |
| | | tggactcaagacgatagttaccggataaggcgcagcggtcgggctgaacggggggttcgtgcacac |
| | | agcccagcttggagcgaacgacctacaccgaactgagatacctacagcgtgagctatgagaaagcg |
| | | ccacgcttcccgaagggagaaaggcggacaggtatccggtaagcggcagggtcggaacaggagagc |
| | | gcacgagggagcttccagggggaaacgcctggtatctttatagtcctgtcgggtttcgccacctct |
| | | gacttgagcgtcgatttttgtgatgctcgtcaggggggcggagcctatggaaaaacgccagcaacg |
| | | cggcctttttacggttcctggccttttgctggccttttgctcacatgttctttcctgcgttatccc |
| | | ctgattctgtggataaccgtattaccgcctttgagtgagctgataccgctcgccgcagccgaacga |
| | | ccgagcgcagcgagtcagtgagcgaggaagcggaagagcgcccaatacgcaaaccgcctctccccg |
| | | cgcgttggccgattcattaatgcagctggcacgacaggtttcccgactggaaagcgggcagtgagc |
| | | gcaacgcaattaatgtgagttagctcactcattaggcaccccaggctttacactttatgcttccgg |
| | | ctcgtatgttgtgtggaattgtgagcggataacaatttcacacaggaaacagctatgaccatgatt |
| | | acgccaagcgcgcaattaaccctcactaaagggaacaaaagctggagctgcaagcttaatgtagtc |
| | | ttatgcaatactcttgtagtcttgcaacatggtaacgatgagttagcaacatgccttacaaggaga |
| | | gaaaaagcaccgtgcatgccgattggtggaagtaaggtggtacgatcgtgccttattaggaaggca |
| | | acagacgggtctgacatggattggacgaaccactgaattgccgcattgcagagatattgtatttaa |
| | | gtgcctagctcgatacataaacgggtctctctggttagaccagatctgagcctgggagctctctgg |
| | | ctaactagggaacccactgcttaagcctcaataaagcttgccttgagtgcttcaagtagtgtgtgc |
| | | ccgtctgttgtgtgactctggtaactagagatccctcagacccttttagtcagtgtggaaaatctc |
| | | tagcagtggcgcccgaacagggacttgaaagcgaaagggaaaccagaggagctctctcgacgcagg |
| | | actcggcttgctgaagcgcgcacggcaagaggcgaggggcggcgactggtgagtacgccaaaaatt |
| | | ttgactagcggaggctagaaggagagagatgggtgcgagagcgtcagtattaagcgggggagaatt |
| | | agatcgcgatgggaaaaaattcggttaaggccagggggaaagaaaaaatataaattaaaacatata |
| | | gtatgggcaagcagggagctagaacgattcgcagttaatcctggcctgttagaaacatcagaaggc |
| | | tgtagacaaatactgggacagctacaaccatcccttcagacaggatcagaagaacttagatcatta |
| | | tataatacagtagcaaccctctattgtgtgcatcaaaggatagagataaaagacaccaaggaagct |
| | | ttagacaagatagaggaagagcaaaacaaaagtaagaccaccgcacagcaagcggccgctgatctt |
| | | cagacctggaggaggagatatgagggacaattggagaagtgaattatataaatataaagtagtaaa |
| | | aattgaaccattaggagtagcacccaccaaggcaaagagaagagtggtgcagagagaaaaaagagc |
| | | agtgggaataggagctttgttccttgggttcttgggagcagcaggaagcactatgggcgcagcgtc |
| | | aatgacgctgacggtacaggccagacaattattgtctggtatagtgcagcagcagaacaatttgct |
| | | gagggctattgaggcgcaacagcatctgttgcaactcacagtctggggcatcaagcagctccaggc |
| | | aagaatcctggctgtggaaagatacctaaaggatcaacagctcctggggatttggggttgctctgg |
| | | aaaactcatttgcaccactgctgtgccttggaatgctagttggagtaataaatctctggaacagat |
| | | ttggaatcacacgacctggatggagtgggacagagaaattaacaattacacaagcttaatacactc |
| | | cttaattgaagaatcgcaaaaccagcaagaaaagaatgaacaagaattattggaattagataaatg |
| | | ggcaagtttgtggaattggtttaacataacaaattggctgtggtatataaaattattcataatgat |
| | | agtaggaggcttggtaggtttaagaatagtttttgctgtactttctatagtgaatagagttaggca |
| | | gggatattcaccattatcgtttcagacccacctcccaaccccgaggggacccgacaggcccgaagg |
| | | aatagaagaagaaggtggagagagagacagagacagatccattcgattagtgaacggatctcgacg |
| | | gtatcgattagactgtagcccaggaatatggcagctagattgtacacatttagaaggaaaagttat |
| | | cttggtagcagttcatgtagccagtggatatatagaagcagaagtaattccagcagagacagggca |
| | | agaaacagcatacttcctcttaaaattagcaggaagatggccagtaaaaacagtacatacagacaa |
| | | tggcagcaatttcaccagtactacagttaaggccgcctgttggtgggcggggatcaagcaggaatt |
| | | tggcattccctacaatccccaaagtcaaggagtaatagaatctatgaataaagaattaaagaaaat |
| | | tataggacaggtaagagatcaggctgaacatcttaagacagcagtacaaatggcagtattcatcca |
| | | caattttaaaagaaaaggggggattgggggggtacagtgcaggggaaagaatagtagacataatag |
| | | caacagacatacaaactaaagaattacaaaaacaaattacaaaaattcaaaattttcgggtttatt |
| | | acagggacagcagagatccagtttggctgcatacgcgtcgtgaggctccggtgcccgtcagtgggc |
| | | agagcgcacatcgcccacagtccccgagaagttggggggaggggtcggcaattgaaccggtgccta |
| | | gagaaggtggcgcggggtaaactgggaaagtgatgtcgtgtactggctccgcctttttcccgaggg |
| | | tgggggagaaccgtatataagtgcagtagtcgccgtgaacgttctttttcgcaacgggtttgccgc |
| | | cagaacacaggtaagtgccgtgtgtggttcccgcgggcctggcctctttacgggttatggcccttg |
| | | cgtgccttgaattacttccacctggctgcagtacgtgattcttgatcccgagcttcgggttggaag |
| | | tgggtgggagagttcgaggccttgcgcttaaggagccccttcgcctcgtgcttgagttgaggcctg |
| | | gcctgggcgctggggccgccgcgtgcgaatctggtggcaccttcgcgcctgtctcgctgctttcga |
| | | taagtctctagccatttaaaatttttgatgacctgctgcgacgctttttttctggcaagatagtct |
| | | tgtaaatgcgggccaagatctgcacactggtatttcggtttttggggccgcgggcggcgacggggc |
| | | ccgtgcgtcccagcgcacatgttcggcgaggcggggcctgcgagcgcggccaccgagaatcggacg |
| | | ggggtagtctcaagctggccggcctgctctggtgcctggcctcgcgccgccgtgtatcgccccgcc |
| | | ctgggcggcaaggctggcccggtcggcaccagttgcgtgagcggaaagatggccgcttcccggccc |
| | | tgctgcagggagctcaaaatggaggacgcggcgctcgggagagcgggcgggtgagtcacccacaca |
| | | aaggaaaagggcctttccgtcctcagccgtcgcttcatgtgactccactgagtaccgggcgccgtc |
| | | caggcacctcgattagttctcgtgcttttggagtacgtcgtctttaggttggggggaggggtttta |
| | | tgcgatggagtttccccacactgagtgggtggagactgaagttaggccagcttggcacttgatgta |
| | | attctccttggaatttgccctttttgagtttggatcttggttcattctcaagcctcagacagtggt |
| | | tcaaagtttttttcttccatttcaggtgtcgtgagctagctctagagccaccatggccctgcctgt |
| | | gacagccctgctgctgcctctggctctgctgctgcatgccgctagacccggatcccaggtgcagct |
| | | gcagcagtctggacccggcctcgtgaagcctagccagaccctgtctctgacctgcgccatcagcgg |
| | | cgatagcgtgtccagcaatagcgccgcctggaactggatcagacagagccctagcagaggcctgga |
| | | atggctgggccggacctactaccggtccaagtggtacaacgactacgccgtgtccgtgaagtcccg |
| | | gatcaccatcaaccccgacaccagcaagaaccagttctccctgcagctgaacagcgtgacccccga |
| | | ggataccgccgtgtactactgcgccagagaagtgaccggcgacctggaagatgccttcgacatctg |
| | | gggccagggcacaatggtcaccgtgtctagcggaggcggaggatctggcggcggaggaagtggcgg |
| | | agggggatctgggggaggcggaagcgatatccagatgacccagagccccagctccctgtctgccag |
| | | cgtgggcgacagagtgaccatcacctgtagggccagccagaccatctggtcctacctgaactggta |
| | | tcagcagcggcctggcaaggcccccaacctgctgatctatgccgccagctctctgcagtccggcgt |
| | | gcccagcagattttccggcagaggctccggcaccgacttcaccctgacaatcagttccctgcaggc |
| | | cgaggacttcgccacctactactgccagcagagctacagcatcccccagaccttcggccaggggac |
| | | caagctggaaatcaagtccggaaccacgacgccagcgccgcgaccaccaacaccggcgcccaccat |
| | | cgcgtcgcagcccctgtccctgcgcccagaggcgtgccggccagcggcggggggcgcagtgcacac |
| | | gagggggctggacttcgcctgtgatatctacatctgggcgcccttggccgggacttgtggggtcct |
| | | tctcctgtcactggttatcaccctttactgcaaacggggcagaaagaaactcctgtatatattcaa |
| | | acaaccatttatgagaccagtacaaactactcaagaggaagatggctgtagctgccgatttccaga |
| | | agaagaagaaggaggatgtgaactgagagtgaagttcagcaggagcgcagacgcccccgcgtacaa |
| | | gcagggccagaaccagctctataacgagctcaatctaggacgaagagaggagtacgatgttttgga |
| | | caagagacgtggccgggaccctgagatggggggaaagccgagaaggaagaaccctcaggaaggcct |
| | | gtacaatgaactgcagaaagataagatggcggaggcctacagtgagattgggatgaaaggcgagcg |
| | | ccggaggggcaaggggcacgatggcctttaccagggtctcagtacagccaccaaggacacctacga |
| | | cgcccttcacatgcaggccctgccccctcgctaagtcgacaatcaacctctggattacaaaatttg |
| | | tgaaagattgactggtattcttaactatgttgctccttttacgctatgtggatacgctgctttaat |
| | | gcctttgtatcatgctattgcttcccgtatggctttcattttctcctccttgtataaatcctggtt |
| | | gctgtctctttatgaggagttgtggcccgttgtcaggcaacgtggcgtggtgtgcactgtgtttgc |
| | | tgacgcaacccccactggttggggcattgccaccacctgtcagctcctttccgggactttcgcttt |
| | | ccccctccctattgccacggcggaactcatcgccgcctgccttgcccgctgctggacaggggctcg |
| | | gctgttgggcactgacaattccgtggtgttgtcggggaagctgacgtcctttccatggctgctcgc |
| | | ctgtgttgccacctggattctgcgcgggacgtccttctgctacgtcccttcggccctcaatccagc |
| | | ggaccttccttcccgcggcctgctgccggctctgcggcctcttccgcgtcttcgccttcgccctca |
| | | gacgagtcggatctccctttgggccgcctccccgcctggaattcgagctcggtacctttaagacca |
| | | atgacttacaaggcagctgtagatcttagccactttttaaaagaaaaggggggactggaagggcta |
| | | attcactcccaacgaagacaagatctgctttttgcttgtactgggtctctctggttagaccagatc |
| | | tgagcctgggagctctctggctaactagggaacccactgcttaagcctcaataaagcttgccttga |
| | | gtgcttcaagtagtgtgtgcccgtctgttgtgtgactctggtaactagagatccctcagacccttt |
| | | tagtcagtgtggaaaatctctagcagtagtagttcatgtcatcttattattcagtatttataactt |
| | | gcaaagaaatgaatatcagagagtgagaggaacttgtttattgcagcttataatggttacaaataa |
| | | agcaatagcatcacaaatttcacaaataaagcatttttttcactgcattctagttgtggtttgtcc |
| | | aaactcatcaatgtatcttatcatgtctggctctagctatcccgcccctaactccgcccagttccg |
| | | cccattctccgccccatggctgactaattttttttatttatgcagaggccgaggccgcctcggcct |
| | | ctgagctattccagaagtagtgaggaggcttttttggaggcctaggcttttgcgtcgagacgtacc |
| | | caattcgccctatagtgagtcgtattacgcgcgctcactggccgtcgttttacaacgtcgtgactg |
| | | ggaaaaccctggcgttacccaacttaatcgccttgcagcacatccccctttcgccagctggcgtaa |
| | | tagcgaagaggcccgcaccgatcgcccttcccaacagttgcgcagcctgaatggcgaatgggacgc |
| | | gccctgtagcggcgcattaagcgcggcgggtgtggtggttacgcgcagcgtgaccgctacacttgc |
| | | cagcgccctagcgcccgctcctttcgctttcttcccttcctttctcgccacgttcgccggctttcc |
| | | ccgtcaagctctaaatcgggggctccctttagggttccgatttagtgctttacggcacctcgaccc |
| | | caaaaaacttgattagggtgatggttcacgtagtgggccatcgccctgatagacggtttttcgccc |
| | | tttgacgttggagtccacgttctttaatagtggactcttgttccaaactggaacaacactcaaccc |
| | | tatctcggtctattcttttgatttataagggattttgccgatttcggcctattggttaaaaaatga |
| | | gctgatttaacaaaaatttaacgcgaattttaacaaaatattaacgcttacaatttaggtggcact |
| | | tttcggggaaatgtgcgcggaacccctatttgtttatttttctaaatacattcaaatatgtatccg |
| | | ctcatgagacaataaccctgataaatgcttcaataatattgaaaaaggaagagtatgagtattcaa |
| | | catttccgtgtcgcccttattcccttttttgcggcattttgccttcctgtttttgctcacccagaa |
| | | acgctggtgaaagtaaaagatgctgaagatcagttgg |
| m971 VH | 201 | qvqlqqsgpg lvkpsqtlsl tcaisgdsvs snsaawnwir qspsrglewl grtyyrskwy |
| | | ndyavsvksr itinpdtskn qfslqlnsvt pedtavyyca revtgdleda fdiwgqgtmv |
| | | tvssastkgp svfplapssk stsggtaalg clvkdyfpep vtvswnsgal tsgvhtfpav |
| | | lqssglysls svvtvpsssl gtqtyicnvs hkpsntkvdk kvepkscdkt sgqag |
| m971 VL | 202 | diqmtqspss lsasvgdrvt itcrasqtiw sylnwyqqrp gkapnlliya asslqsgvps |
| | | rfsgrgsgtd ftltisslqa edfatyycqq sysipqtfgq gtkleikrtv aapsvfifpp |
| | | sdeqlksgta svvcllnnfy preakvqwkv dnalqsgnsq esvteqdskd styslsstlt |
| | | lskadyekhk vyacevthqg lsspvtksfn rgec |
| CAR22-1 | 203 | qvqlvqsgggliqpggslrlscaasgftvssnymswvrqapgkglewvsviysggstyyadsvkgr |
| scFv | | ftisrdnskntlylqmnslraedtavyycasqstpydssgyysgdafdiwgqgtmvtvssggggsg |
| AA | | gggsggggssyvltqppsasgtpgqrvtiscsgsssnigsnyvywyqqlpgtapklliyrnnqrps |
| | | gvpdrfsgsksgtsaslaisglrsedeadyycaawddslsgyvfgtgtkltvl |
| CAR22-1 | 204 | caagtgcaactcgtccaatccggcggcggactgattcaaccaggaggttcccttagactctcatgt |
| scFv NT | | gccgctagcggattcactgtgtcctcaaactacatgagctgggtccgccaggcgcccggaaagggc |
| | | ctggaatgggtgtccgtgatctactcgggcggatcaacctactacgccgattccgtgaaggggcgg |
| | | ttcaccatctcgcgggataactccaagaacaccctgtacttgcaaatgaactcactgagggccgaa |
| | | gataccgccgtctactactgcgcgagccagtccactccctacgactcgagcgggtactactccggg |
| | | gacgccttcgacatctggggacagggaactatggtcacggtgtcgtcgggaggagggggcagcggc |
| | | ggcggaggaagcgggggagggggttcgtcctatgtgctgacccagccgccgagcgcctccgggact |
| | | ccgggccagcgcgtgaccatttcctgctccggctcctcatccaacatcggttcgaattatgtgtac |
| | | tggtaccagcagctgcctggtactgcccctaagcttctcatctaccggaacaaccagcgcccgtct |
| | | ggcgtgcccgaccggttctccggctcgaagtccggcaccagcgcctccctggctatctccgggctg |
| | | agatccgaggatgaggccgactactattgcgcagcgtgggacgacagcctgtcgggatacgtgttt |
| | | ggaaccggaaccaagctcaccgtgctg |
| CAR22-1 | 205 | atggccctccctgtcaccgccctgctgcttccgctggctcttctgctccacgccgctcggccccaa |
| soluble | | gtgcaactcgtccaatccggcggcggactgattcaaccaggaggttcccttagactctcatgtgcc |
| scFV NT | | gctagcggattcactgtgtcctcaaactacatgagctgggtccgccaggcgcccggaaagggcctg |
| | | gaatgggtgtccgtgatctactcgggcggatcaacctactacgccgattccgtgaaggggcggttc |
| | | accatctcgcgggataactccaagaacaccctgtacttgcaaatgaactcactgagggccgaagat |
| | | accgccgtctactactgcgcgagccagtccactccctacgactcgagcgggtactactccggggac |
| | | gccttcgacatctggggacagggaactatggtcacggtgtcgtcgggaggagggggcagcggcggc |
| | | ggaggaagcgggggagggggttcgtcctatgtgctgacccagccgccgagcgcctccgggactccg |
| | | ggccagcgcgtgaccatttcctgctccggctcctcatccaacatcggttcgaattatgtgtactgg |
| | | taccagcagctgcctggtactgcccctaagcttctcatctaccggaacaaccagcgcccgtctggc |
| | | gtgcccgaccggttctccggctcgaagtccggcaccagcgcctccctggctatctccgggctgaga |
| | | tccgaggatgaggccgactactattgcgcagcgtgggacgacagcctgtcgggatacgtgtttgga |
| | | accggaaccaagctcaccgtgctgggatcgcaccaccatcaccatcatcatcac |
| CAR22-1 | 206 | malpvtalllplalllhaarpqvqlvqsgggliqpggslrlscaasgftvssnymswvrqapgkgl |
| soluble | | ewvsviysggstyyadsvkgrftisrdnskntlylqmnslraedtavyycasqstpydssgyysgd |
| scFV AA | | afdiwgqgtmvtvssggggsggggsggggssyvltqppsasgtpgqrvtiscsgsssnigsnyvyw |
| | | yqqlpgtapklliyrnnqrpsgvpdrfsgsksgtsaslaisglrsedeadyycaawddslsgyvfg |
| | | tgtkltvlgshhhhhhhh |
| CAR22-1 | 207 | malpvtalllplalllhaarpqvqlvqsgggliqpggslrlscaasgftvssnymswvrqapgkgl |
| Full AA | | ewvsviysggstyyadsvkgrftisrdnskntlylqmnslraedtavyycasqstpydssgyysgd |
| | | afdiwgqgtmvtvssggggsggggsggggssyvltqppsasgtpgqrvtiscsgsssnigsnyvyw |
| | | yqqlpgtapklliyrnnqrpsgvpdrfsgsksgtsaslaisglrsedeadyycaawddslsgyvfg |
| | | tgtkltvltttpaprpptpaptiasqplslrpeacrpaaggavhtrgldfacdiyiwaplagtcgv |
| | | lllslvitlyckrgrkkllyifkqpfmrpvqttqeedgcscrfpeeeeggcelrvkfsrsadapay |
| | | kqgqnqlynelnlgrreeydvldkrrgrdpemggkprrknpqeglynelqkdkmaeayseigmkge |
| | | rrrgkghdglyqglstatkdtydalhmqalppr |
| CAR22-1 | 208 | atggccctccctgtcaccgccctgctgcttccgctggctcttctgctccacgccgctcggccccaa |
| Full NT | | gtgcaactcgtccaatccggcggcggactgattcaaccaggaggttcccttagactctcatgtgcc |
| lentivirus | | gctagcggattcactgtgtcctcaaactacatgagctgggtccgccaggcgcccggaaagggcctg |
| | | gaatgggtgtccgtgatctactcgggcggatcaacctactacgccgattccgtgaaggggcggttc |
| | | accatctcgcgggataactccaagaacaccctgtacttgcaaatgaactcactgagggccgaagat |
| | | accgccgtctactactgcgcgagccagtccactccctacgactcgagcgggtactactccggggac |
| | | gccttcgacatctggggacagggaactatggtcacggtgtcgtcgggaggagggggcagcggcggc |
| | | ggaggaagcgggggagggggttcgtcctatgtgctgacccagccgccgagcgcctccgggactccg |
| | | ggccagcgcgtgaccatttcctgctccggctcctcatccaacatcggttcgaattatgtgtactgg |
| | | taccagcagctgcctggtactgcccctaagcttctcatctaccggaacaaccagcgcccgtctggc |
| | | gtgcccgaccggttctccggctcgaagtccggcaccagcgcctccctggctatctccgggctgaga |
| | | tccgaggatgaggccgactactattgcgcagcgtgggacgacagcctgtcgggatacgtgtttgga |
| | | accggaaccaagctcaccgtgctgaccactaccccagcaccgaggccacccaccccggctcctacc |
| | | atcgcctcccagcctctgtccctgcgtccggaggcatgtagacccgcagctggtggggccgtgcat |
| | | acccggggtcttgacttcgcctgcgatatctacatttgggcccctctggctggtacttgcggggtc |
| | | ctgctgctttcactcgtgatcactctttactgtaagcgcggtcggaagaagctgctgtacatcttt |
| | | aagcaacccttcatgaggcctgtgcagactactcaagaggaggacggctgttcatgccggttccca |
| | | gaggaggaggaaggcggctgcgaactgcgcgtgaaattcagccgcagcgcagatgctccagcctac |
| | | aagcaggggcagaaccagctctacaacgaactcaatcttggtcggagagaggagtacgacgtgctg |
| | | gacaagcggagaggacgggacccagaaatgggcgggaagccgcgcagaaagaatccccaagagggc |
| | | ctgtacaacgagctccaaaaggataagatggcagaagcctatagcgagattggtatgaaaggggaa |
| | | cgcagaagaggcaaaggccacgacggactgtaccagggactcagcaccgccaccaaggacacctat |
| | | gacgctcttcacatgcaggccctgccgcctcgg |
| CAR22-2 | 209 | evqlqqsgpglvkpsqtlsltcaisgdsvssnsaawnwirqspsrglewlgrtyyrskwyndyavs |
| scFv | | vksritinpdtsknqfslqlnsvtpedtavyycardlgwiavagtfdywgqgtlvtvssggggsgg |
| AA | | ggsggggsqsaltqpasvsgspgqsitisctgtssdvggynyvswyqqhpgkapklmiydvskrps |
| | | gvsnrfsgsksgntasltisglqaedeadyycssytssslnhvfgtgtkvtvl |
| CAR22-2 | 210 | gaagtgcaactccaacagagcggacccggacttgtgaaaccatcccagactctcagcctgacgtgt |
| scFv NT | | gcgatcagcggggactctgtgtcctccaactccgccgcctggaactggattaggcagtcgccgtcg |
| | | agagggctggagtggttgggtagaacctactaccggtccaagtggtacaatgactacgccgtgtcc |
| | | gtgaagtcccggatcactattaacccggatacctcaaagaaccagttctccctgcaactgaactcg |
| | | gtgacccctgaggacaccgcagtgtactactgcgcccgggatctgggttggatcgctgtcgccggc |
| | | accttcgactattggggacagggcactctcgtgaccgtgtcgtcgggtggaggagggagcggaggg |
| | | ggcggaagcggtggcggcggttcccagtccgcgctgacccagcctgctagcgtgtccgggtcgccc |
| | | ggacagtcaatcaccatctcctgcactgggactagcagcgacgtgggcggctacaactacgtgtca |
| | | tggtaccagcagcacccgggaaaggcgcccaagctgatgatctacgacgtgtccaagcgcccttcg |
| | | ggagtctccaaccgctttagcggctccaagtcgggcaacactgcctccctgaccattagcggactg |
| | | caggccgaagatgaggccgactattactgctcatcctacacctcctcctcactgaaccatgtgttc |
| | | ggcaccggaaccaaggtcacagtcctc |
| CAR22-2 | 211 | atggccctccctgtcaccgccctgctgcttccgctggctcttctgctccacgccgctcggcccgaa |
| soluble | | gtgcaactccaacagagcggacccggacttgtgaaaccatcccagactctcagcctgacgtgtgcg |
| scFV NT | | atcagcggggactctgtgtcctccaactccgccgcctggaactggattaggcagtcgccgtcgaga |
| | | gggctggagtggttgggtagaacctactaccggtccaagtggtacaatgactacgccgtgtccgtg |
| | | aagtcccggatcactattaacccggatacctcaaagaaccagttctccctgcaactgaactcggtg |
| | | acccctgaggacaccgcagtgtactactgcgcccgggatctgggttggatcgctgtcgccggcacc |
| | | ttcgactattggggacagggcactctcgtgaccgtgtcgtcgggtggaggagggagcggagggggc |
| | | ggaagcggtggcggcggttcccagtccgcgctgacccagcctgctagcgtgtccgggtcgcccgga |
| | | cagtcaatcaccatctcctgcactgggactagcagcgacgtgggcggctacaactacgtgtcatgg |
| | | taccagcagcacccgggaaaggcgcccaagctgatgatctacgacgtgtccaagcgcccttcggga |
| | | gtctccaaccgctttagcggctccaagtcgggcaacactgcctccctgaccattagcggactgcag |
| | | gccgaagatgaggccgactattactgctcatcctacacctcctcctcactgaaccatgtgttcggc |
| | | accggaaccaaggtcacagtcctcggatcgcaccaccatcaccatcatcatcac |
| CAR22-2 | 212 | Malpvtalllplalllhaarpevqlqqsgpglvkpsqtlsltcaisgdsvssnsaawnwirqspsr |
| soluble | | glewlgrtyyrskwyndyavsvksritinpdtsknqfslqlnsvtpedtavyycardlgwiavagt |
| scFV AA | | fdywgqgtlvtvssggggsggggsggggsqsaltqpasvsgspgqsitisctgtssdvggynyvsw |
| | | yqqhpgkapklmiydvskrpsgvsnrfsgsksgntasltisglqaedeadyycssytssslnhvfg |
| | | tgtkvtvlgshhhhhhhh |
| CAR22-2 | 213 | malpvtalllplalllhaarpevqlqqsgpglvkpsqtlsltcaisgdsvssnsaawnwirqspsr |
| Full AA | | glewlgrtyyrskwyndyavsvksritinpdtsknqfslqlnsvtpedtavyycardlgwiavagt |
| | | fdywgqgtlvtvssggggsggggsggggsqsaltqpasvsgspgqsitisctgtssdvggynyvsw |
| | | yqqhpgkapklmiydvskrpsgvsnrfsgsksgntasltisglqaedeadyycssytssslnhvfg |
| | | tgtkvtvltttpaprpptpaptiasqplslrpeacrpaaggavhtrgldfacdiyiwaplagtcgv |
| | | lllslvitlyckrgrkkllyifkqpfmrpvqttqeedgcscrfpeeeeggcelrvkfsrsadapay |
| | | kqgqnqlynelnlgrreeydvldkrrgrdpemggkprrknpqeglynelqkdkmaeayseigmkge |
| | | rrrgkghdglyqglstatkdtydalhmqalppr |
| CAR22-2 | 214 | atggccctccctgtcaccgccctgctgcttccgctggctcttctgctccacgccgctcggcccgaa |
| Full NT | | gtgcaactccaacagagcggacccggacttgtgaaaccatcccagactctcagcctgacgtgtgcg |
| lentivirus | | atcagcggggactctgtgtcctccaactccgccgcctggaactggattaggcagtcgccgtcgaga |
| | | gggctggagtggttgggtagaacctactaccggtccaagtggtacaatgactacgccgtgtccgtg |
| | | aagtcccggatcactattaacccggatacctcaaagaaccagttctccctgcaactgaactcggtg |
| | | acccctgaggacaccgcagtgtactactgcgcccgggatctgggttggatcgctgtcgccggcacc |
| | | ttcgactattggggacagggcactctcgtgaccgtgtcgtcgggtggaggagggagcggagggggc |
| | | ggaagcggtggcggcggttcccagtccgcgctgacccagcctgctagcgtgtccgggtcgcccgga |
| | | cagtcaatcaccatctcctgcactgggactagcagcgacgtgggcggctacaactacgtgtcatgg |
| | | taccagcagcacccgggaaaggcgcccaagctgatgatctacgacgtgtccaagcgcccttcggga |
| | | gtctccaaccgctttagcggctccaagtcgggcaacactgcctccctgaccattagcggactgcag |
| | | gccgaagatgaggccgactattactgctcatcctacacctcctcctcactgaaccatgtgttcggc |
| | | accggaaccaaggtcacagtcctcaccactaccccagcaccgaggccacccaccccggctcctacc |
| | | atcgcctcccagcctctgtccctgcgtccggaggcatgtagacccgcagctggtggggccgtgcat |
| | | acccggggtcttgacttcgcctgcgatatctacatttgggcccctctggctggtacttgcggggtc |
| | | ctgctgctttcactcgtgatcactctttactgtaagcgcggtcggaagaagctgctgtacatcttt |
| | | aagcaacccttcatgaggcctgtgcagactactcaagaggaggacggctgttcatgccggttccca |
| | | gaggaggaggaaggcggctgcgaactgcgcgtgaaattcagccgcagcgcagatgctccagcctac |
| | | aagcaggggcagaaccagctctacaacgaactcaatcttggtcggagagaggagtacgacgtgctg |
| | | gacaagcggagaggacgggacccagaaatgggcgggaagccgcgcagaaagaatccccaagagggc |
| | | ctgtacaacgagctccaaaaggataagatggcagaagcctatagcgagattggtatgaaaggggaa |
| | | cgcagaagaggcaaaggccacgacggactgtaccagggactcagcaccgccaccaaggacacctat |
| | | gacgctcttcacatgcaggccctgccgcctcgg |
| CAR22-3 | 215 | evqlqqsgpglvkpsqtlsltcaisgdsvlsnsdtwnwirqspsrglewlgrtyhrstwyddyass |
| scFv | | vrgrvsinvdtsknqyslqlnavtpedtgayycardrlqdgnswsdafdvwgqgtmvtvssggggs |
| AA | | ggggsggggsqsaltqpasvsgspgqsitisctgtssdvggynyvswyqqhpgkapklmiydvsnr |
| | | psgvsnrfsgsksgntasltisglqaedeadyycssytssstpyvfgtgtqltvl |
| CAR22-3 | 216 | gaagtgcaactccaacagagcggacccggacttgtgaaaccttcccaaactctctccctgacctgt |
| scFv NT | | gcgatctctggggattcggtgctgtcgaatagcgacacctggaactggatcagacagtcaccctcc |
| | | cggggcctggagtggctcgggagaacttaccaccggtccacttggtacgacgactatgccagctca |
| | | gtgcgcggaagggtgtccattaacgtggacacctccaagaaccagtacagcctgcagttgaacgct |
| | | gtgaccccggaagataccggagcctactactgcgcccgcgaccggctgcaggacggaaactcctgg |
| | | tccgatgccttcgacgtctggggccagggaaccatggtcactgtgtcatccggcggtggcggttcg |
| | | ggcggtggtggcagcggtggaggcggctcccagtcggcactgactcagccagcttcagtctccggc |
| | | tcgccgggacagtccatcaccatttcctgcactggaaccagctccgatgtcggggggtataactac |
| | | gtgtcgtggtaccagcaacatcctggaaaggcccccaagctcatgatctacgacgtgtccaatcgc |
| | | cctagcggagtgtcaaaccggttttccggctccaagtccgggaacaccgcgtccctgacaatcagc |
| | | ggactgcaggccgaggacgaagccgactactactgctcgagctacaccagctcgtccacgccgtac |
| | | gtgttcggaactgggacccagctgaccgtgctg |
| CAR22-3 | 217 | atggccctccctgtcaccgccctgctgcttccgctggctcttctgctccacgccgctcggcccgaa |
| soluble | | gtgcaactccaacagagcggacccggacttgtgaaaccttcccaaactctctccctgacctgtgcg |
| scFV NT | | atctctggggattcggtgctgtcgaatagcgacacctggaactggatcagacagtcaccctcccgg |
| | | ggcctggagtggctcgggagaacttaccaccggtccacttggtacgacgactatgccagctcagtg |
| | | cgcggaagggtgtccattaacgtggacacctccaagaaccagtacagcctgcagttgaacgctgtg |
| | | accccggaagataccggagcctactactgcgcccgcgaccggctgcaggacggaaactcctggtcc |
| | | gatgccttcgacgtctggggccagggaaccatggtcactgtgtcatccggcggtggcggttcgggc |
| | | ggtggtggcagcggtggaggcggctcccagtcggcactgactcagccagcttcagtctccggctcg |
| | | ccgggacagtccatcaccatttcctgcactggaaccagctccgatgtcggggggtataactacgtg |
| | | tcgtggtaccagcaacatcctggaaaggcccccaagctcatgatctacgacgtgtccaatcgccct |
| | | agcggagtgtcaaaccggttttccggctccaagtccgggaacaccgcgtccctgacaatcagcgga |
| | | ctgcaggccgaggacgaagccgactactactgctcgagctacaccagctcgtccacgccgtacgtg |
| | | ttcggaactgggacccagctgaccgtgctgggatcgcaccaccatcaccatcatcatcac |
| CAR22-3 | 218 | malpvtalllplalllhaarpevqlqqsgpglvkpsqtlsltcaisgdsvlsnsdtwnwirqspsr |
| soluble | | glewlgrtyhrstwyddyassvrgrvsinvdtsknqyslqlnavtpedtgayycardrlqdgnsws |
| scFV AA | | dafdvwgqgtmvtvssggggsggggsggggsqsaltqpasvsgspgqsitisctgtssdvggynyv |
| | | swyqqhpgkapklmiydvsnrpsgvsnrfsgsksgntasltisglqaedeadyycssytssstpyv |
| | | fgtgtqltvlgshhhhhhhh |
| CAR22-3 | 219 | malpvtalllplalllhaarpevqlqqsgpglvkpsqtlsltcaisgdsvlsnsdtwnwirqspsr |
| Full AA | | glewlgrtyhrstwyddyassvrgrvsinvdtsknqyslqlnavtpedtgayycardrlqdgnsws |
| | | dafdvwgqgtmvtvssggggsggggsggggsqsaltqpasvsgspgqsitisctgtssdvggynyv |
| | | swyqqhpgkapklmiydvsnrpsgvsnrfsgsksgntasltisglqaedeadyycssytssstpyv |
| | | fgtgtqltvltttpaprpptpaptiasqplslrpeacrpaaggavhtrgldfacdiyiwaplagtc |
| | | gvlllslvitlyckrgrkkllyifkqpfmrpvqttqeedgcscrfpeeeeggcelrvkfsrsadap |
| | | aykqgqnqlynelnlgrreeydvldkrrgrdpemggkprrknpqeglynelqkdkmaeayseigmk |
| | | gerrrgkghdglyqglstatkdtydalhmqalppr |
| CAR22-3 | 220 | atggccctccctgtcaccgccctgctgcttccgctggctcttctgctccacgccgctcggcccgaa |
| Full NT | | gtgcaactccaacagagcggacccggacttgtgaaaccttcccaaactctctccctgacctgtgcg |
| lentivirus | | atctctggggattcggtgctgtcgaatagcgacacctggaactggatcagacagtcaccctcccgg |
| | | ggcctggagtggctcgggagaacttaccaccggtccacttggtacgacgactatgccagctcagtg |
| | | cgcggaagggtgtccattaacgtggacacctccaagaaccagtacagcctgcagttgaacgctgtg |
| | | accccggaagataccggagcctactactgcgcccgcgaccggctgcaggacggaaactcctggtcc |
| | | gatgccttcgacgtctggggccagggaaccatggtcactgtgtcatccggcggtggcggttcgggc |
| | | ggtggtggcagcggtggaggcggctcccagtcggcactgactcagccagcttcagtctccggctcg |
| | | ccgggacagtccatcaccatttcctgcactggaaccagctccgatgtcggggggtataactacgtg |
| | | tcgtggtaccagcaacatcctggaaaggcccccaagctcatgatctacgacgtgtccaatcgccct |
| | | agcggagtgtcaaaccggttttccggctccaagtccgggaacaccgcgtccctgacaatcagcgga |
| | | ctgcaggccgaggacgaagccgactactactgctcgagctacaccagctcgtccacgccgtacgtg |
| | | ttcggaactgggacccagctgaccgtgctgaccactaccccagcaccgaggccacccaccccggct |
| | | cctaccatcgcctcccagcctctgtccctgcgtccggaggcatgtagacccgcagctggtggggcc |
| | | gtgcatacccggggtcttgacttcgcctgcgatatctacatttgggcccctctggctggtacttgc |
| | | ggggtcctgctgctttcactcgtgatcactctttactgtaagcgcggtcggaagaagctgctgtac |
| | | atctttaagcaacccttcatgaggcctgtgcagactactcaagaggaggacggctgttcatgccgg |
| | | ttcccagaggaggaggaaggcggctgcgaactgcgcgtgaaattcagccgcagcgcagatgctcca |
| | | gcctacaagcaggggcagaaccagctctacaacgaactcaatcttggtcggagagaggagtacgac |
| | | gtgctggacaagcggagaggacgggacccagaaatgggcgggaagccgcgcagaaagaatccccaa |
| | | gagggcctgtacaacgagctccaaaaggataagatggcagaagcctatagcgagattggtatgaaa |
| | | ggggaacgcagaagaggcaaaggccacgacggactgtaccagggactcagcaccgccaccaaggac |
| | | acctatgacgctcttcacatgcaggccctgccgcctcgg |
| CAR22-4 | 221 | evqlvesggglvqpgrslrlscaasgftfddyamhwvrqapgkglewvsgiswnsgsigyadsvkg |
| scFv | | rftisrdnaknslylqmnslraedtalyycakglsswhfhdaldiwgqgtmvtvssggggsggggs |
| AA | | ggggssseltqdpavsvalgqtvritcqgdslrsyyaswyqqkpgqapvlviygknnrpsgipdrf |
| | | sgsssgntasltitgaqaedeadyycnsrdssgnhlwvfgggtkltvl |
| CAR22-4 | 222 | gaagtgcagttggtggaatcaggaggaggacttgtgcaacctggaagatctctcagactctcgtgt |
| scFv NT | | gcggcctccggtttcaccttcgacgactacgccatgcattgggtcagacaggccccgggaaagggc |
| | | ctggagtgggtgtcaggcatctcatggaacagcggctccattggctacgccgactcggtcaaggga |
| | | aggttcactatctcccgggacaacgccaagaactccctgtacctccaaatgaacagcctgcgcgcc |
| | | gaggatactgccctgtactactgcgccaaggggctgtccagctggcactttcacgacgcacttgat |
| | | atctggggacagggtaccatggtcaccgtgtcctccggtggcggaggctcagggggaggaggaagc |
| | | gggggcggtggttcctcctccgaactgacccaggacccggccgtgtccgtggcgctgggacaaacc |
| | | gtgcgcattacttgccagggcgacagcttgcggtcgtactacgcctcgtggtaccagcagaagccc |
| | | ggccaggctcccgtgctggtcatctatggcaaaaacaaccgcccgagcggaattccagaccggttc |
| | | tccgggagctcgtccgggaacaccgcttcgctcaccatcacgggggcccaggcggaggacgaagca |
| | | gattactactgcaactcgcgggattccagcggcaatcacctctgggtgttcgggggcggaaccaag |
| | | ctgactgtgctg |
| CAR22-4 | 223 | atggccctccctgtcaccgccctgctgcttccgctggctcttctgctccacgccgctcggcccgaa |
| soluble | | gtgcagttggtggaatcaggaggaggacttgtgcaacctggaagatctctcagactctcgtgtgcg |
| scFV NT | | gcctccggtttcaccttcgacgactacgccatgcattgggtcagacaggccccgggaaagggcctg |
| | | gagtgggtgtcaggcatctcatggaacagcggctccattggctacgccgactcggtcaagggaagg |
| | | ttcactatctcccgggacaacgccaagaactccctgtacctccaaatgaacagcctgcgcgccgag |
| | | gatactgccctgtactactgcgccaaggggctgtccagctggcactttcacgacgcacttgatatc |
| | | tggggacagggtaccatggtcaccgtgtcctccggtggcggaggctcagggggaggaggaagcggg |
| | | ggcggtggttcctcctccgaactgacccaggacccggccgtgtccgtggcgctgggacaaaccgtg |
| | | cgcattacttgccagggcgacagcttgcggtcgtactacgcctcgtggtaccagcagaagcccggc |
| | | caggctcccgtgctggtcatctatggcaaaaacaaccgcccgagcggaattccagaccggttctcc |
| | | gggagctcgtccgggaacaccgcttcgctcaccatcacgggggcccaggcggaggacgaagcagat |
| | | tactactgcaactcgcgggattccagcggcaatcacctctgggtgttcgggggcggaaccaagctg |
| | | actgtgctgggatcgcaccaccatcaccatcatcatcac |
| CAR22-4 | 224 | malpvtalllplalllhaarpevqlvesggglvqpgrslrlscaasgftfddyamhwvrqapgkgl |
| soluble | | ewvsgiswnsgsigyadsvkgrftisrdnaknslylqmnslraedtalyycakglsswhfhdaldi |
| scFV AA | | wgqgtmvtvssggggsggggsggggssseltqdpavsvalgqtvritcqgdslrsyyaswyqqkpg |
| | | qapvlviygknnrpsgipdrfsgsssgntasltitgaqaedeadyycnsrdssgnhlwvfgggtkl |
| | | tvlgshhhhhhhh |
| CAR22-4 | 225 | malpvtalllplalllhaarpevqlvesggglvqpgrslrlscaasgftfddyamhwvrqapgkgl |
| Full AA | | ewvsgiswnsgsigyadsvkgrftisrdnaknslylqmnslraedtalyycakglsswhfhdaldi |
| | | wgqgtmvtvssggggsggggsggggssseltqdpavsvalgqtvritcqgdslrsyyaswyqqkpg |
| | | qapvlviygknnrpsgipdrfsgsssgntasltitgaqaedeadyycnsrdssgnhlwvfgggtkl |
| | | tvltttpaprpptpaptiasqplslrpeacrpaaggavhtrgldfacdiyiwaplagtcgvlllsl |
| | | vitlyckrgrkkllyifkqpfmrpvqttqeedgcscrfpeeeeggcelrvkfsrsadapaykqgqn |
| | | qlynelnlgrreeydvldkrrgrdpemggkprrknpqeglynelqkdkmaeayseigmkgerrrgk |
| | | ghdglyqglstatkdtydalhmqalppr |
| CAR22-4 | 226 | atggccctccctgtcaccgccctgctgcttccgctggctcttctgctccacgccgctcggcccgaa |
| Full NT | | gtgcagttggtggaatcaggaggaggacttgtgcaacctggaagatctctcagactctcgtgtgcg |
| lentivirus | | gcctccggtttcaccttcgacgactacgccatgcattgggtcagacaggccccgggaaagggcctg |
| | | gagtgggtgtcaggcatctcatggaacagcggctccattggctacgccgactcggtcaagggaagg |
| | | ttcactatctcccgggacaacgccaagaactccctgtacctccaaatgaacagcctgcgcgccgag |
| | | gatactgccctgtactactgcgccaaggggctgtccagctggcactttcacgacgcacttgatatc |
| | | tggggacagggtaccatggtcaccgtgtcctccggtggcggaggctcagggggaggaggaagcggg |
| | | ggcggtggttcctcctccgaactgacccaggacccggccgtgtccgtggcgctgggacaaaccgtg |
| | | cgcattacttgccagggcgacagcttgcggtcgtactacgcctcgtggtaccagcagaagcccggc |
| | | caggctcccgtgctggtcatctatggcaaaaacaaccgcccgagcggaattccagaccggttctcc |
| | | gggagctcgtccgggaacaccgcttcgctcaccatcacgggggcccaggcggaggacgaagcagat |
| | | tactactgcaactcgcgggattccagcggcaatcacctctgggtgttcgggggcggaaccaagctg |
| | | actgtgctgaccactaccccagcaccgaggccacccaccccggctcctaccatcgcctcccagcct |
| | | ctgtccctgcgtccggaggcatgtagacccgcagctggtggggccgtgcatacccggggtcttgac |
| | | ttcgcctgcgatatctacatttgggcccctctggctggtacttgcggggtcctgctgctttcactc |
| | | gtgatcactctttactgtaagcgcggtcggaagaagctgctgtacatctttaagcaacccttcatg |
| | | aggcctgtgcagactactcaagaggaggacggctgttcatgccggttcccagaggaggaggaaggc |
| | | ggctgcgaactgcgcgtgaaattcagccgcagcgcagatgctccagcctacaagcaggggcagaac |
| | | cagctctacaacgaactcaatcttggtcggagagaggagtacgacgtgctggacaagcggagagga |
| | | cgggacccagaaatgggcgggaagccgcgcagaaagaatccccaagagggcctgtacaacgagctc |
| | | caaaaggataagatggcagaagcctatagcgagattggtatgaaaggggaacgcagaagaggcaaa |
| | | ggccacgacggactgtaccagggactcagcaccgccaccaaggacacctatgacgctcttcacatg |
| | | caggccctgccgcctcgg |
| CAR22-5 | 227 | evqlvesggglvqpgrslrlscaasgftfddyamhwvrqapgkglewvsgiswnsgsigyadsvkg |
| scFv | | rftisrdnaknslylqmnslraedtalyycakdkgggyydfwsgsdywgqgtlvtvssggggsggg |
| AA | | gsggggssseltqdpavsvalgqtvritcqgdslrsyyaswyqqkpgqapvlviygknnrpsgipd |
| | | rfsgsssgntasltitgaqaedeadyycnsrdssgwvfgggtkltvl |
| CAR22-5 | 116 | gaagtgcaacttgtggaatctggtggaggacttgtgcaacctggaagatcactgagactgtcatgt |
| scFv NT | | gcagcctcggggtttaccttcgacgactacgccatgcactgggtgcgccaggctccggggaagggc |
| | | ctcgaatgggtgtcgggcatcagctggaactccggttccattggctatgcggactccgtgaaagga |
| | | cgcttcacaatttcccgggataacgccaagaacagcctgtacttgcagatgaactccctgcgggcc |
| | | gaggataccgccctgtactactgcgctaaggacaagggcggtggatactacgacttctggagcgga |
| | | agcgactactggggacagggaactctggtcaccgtgtcctccggcggagggggctccggcggcggt |
| | | ggtagcgggggtggagggtcgtcgtcggagctgacccaggaccccgcagtgtccgtcgccctgggg |
| | | cagactgtgcggatcacttgccaaggagacagcctgcggtcctactacgcgtcctggtatcagcag |
| | | aagccggggcaggccccagtcctcgtcatctacggaaagaacaataggcccagcggaatccctgac |
| | | cgcttctcgggctcatcctccggcaacaccgcctccctgaccatcacgggcgcgcaggccgaggac |
| | | gaagccgattactactgcaactcacgggattccagcggatgggtgttcggaggaggaaccaagctc |
| | | actgtgctc |
| CAR22-5 | 228 | atggccctccctgtcaccgccctgctgcttccgctggctcttctgctccacgccgctcggcccgaa |
| soluble | | gtgcaacttgtggaatctggtggaggacttgtgcaacctggaagatcactgagactgtcatgtgca |
| scFV NT | | gcctcggggtttaccttcgacgactacgccatgcactgggtgcgccaggctccggggaagggcctc |
| | | gaatgggtgtcgggcatcagctggaactccggttccattggctatgcggactccgtgaaaggacgc |
| | | ttcacaatttcccgggataacgccaagaacagcctgtacttgcagatgaactccctgcgggccgag |
| | | gataccgccctgtactactgcgctaaggacaagggcggtggatactacgacttctggagcggaagc |
| | | gactactggggacagggaactctggtcaccgtgtcctccggcggagggggctccggcggcggtggt |
| | | agcgggggtggagggtcgtcgtcggagctgacccaggaccccgcagtgtccgtcgccctggggcag |
| | | actgtgcggatcacttgccaaggagacagcctgcggtcctactacgcgtcctggtatcagcagaag |
| | | ccggggcaggccccagtcctcgtcatctacggaaagaacaataggcccagcggaatccctgaccgc |
| | | ttctcgggctcatcctccggcaacaccgcctccctgaccatcacgggcgcgcaggccgaggacgaa |
| | | gccgattactactgcaactcacgggattccagcggatgggtgttcggaggaggaaccaagctcact |
| | | gtgctcggatcgcaccaccatcaccatcatcatcac |
| CAR22-5 | 229 | malpvtalllplalllhaarpevqlvesggglvqpgrslrlscaasgftfddyamhwvrqapgkgl |
| soluble | | ewvsgiswnsgsigyadsvkgrftisrdnaknslylqmnslraedtalyycakdkgggyydfwsgs |
| scFV AA | | dywgqgtlvtvssggggsggggsggggssseltqdpavsvalgqtvritcqgdslrsyyaswyqqk |
| | | pgqapvlviygknnrpsgipdrfsgsssgntasltitgaqaedeadyycnsrdssgwvfgggtklt |
| | | vlgshhhhhhhh |
| CAR22-5 | 230 | malpvtalllplalllhaarpevqlvesggglvqpgrslrlscaasgftfddyamhwvrqapgkgl |
| Full AA | | ewvsgiswnsgsigyadsvkgrftisrdnaknslylqmnslraedtalyycakdkgggyydfwsgs |
| | | dywgqgtlvtvssggggsggggsggggssseltqdpavsvalgqtvritcqgdslrsyyaswyqqk |
| | | pgqapvlviygknnrpsgipdrfsgsssgntasltitgaqaedeadyycnsrdssgwvfgggtklt |
| | | vltttpaprpptpaptiasqplslrpeacrpaaggavhtrgldfacdiyiwaplagtcgvlllslv |
| | | itlyckrgrkkllyifkqpfmrpvqttqeedgcscrfpeeeeggcelrvkfsrsadapaykqgqnq |
| | | lynelnlgrreeydvldkrrgrdpemggkprrknpqeglynelqkdkmaeayseigmkgerrrgkg |
| | | hdglyqglstatkdtydalhmqalppr |
| CAR22-5 | 231 | atggccctccctgtcaccgccctgctgcttccgctggctcttctgctccacgccgctcggcccgaa |
| Full NT | | gtgcaacttgtggaatctggtggaggacttgtgcaacctggaagatcactgagactgtcatgtgca |
| lentivirus | | gcctcggggtttaccttcgacgactacgccatgcactgggtgcgccaggctccggggaagggcctc |
| | | gaatgggtgtcgggcatcagctggaactccggttccattggctatgcggactccgtgaaaggacgc |
| | | ttcacaatttcccgggataacgccaagaacagcctgtacttgcagatgaactccctgcgggccgag |
| | | gataccgccctgtactactgcgctaaggacaagggcggtggatactacgacttctggagcggaagc |
| | | gactactggggacagggaactctggtcaccgtgtcctccggcggagggggctccggcggcggtggt |
| | | agcgggggtggagggtcgtcgtcggagctgacccaggaccccgcagtgtccgtcgccctggggcag |
| | | actgtgcggatcacttgccaaggagacagcctgcggtcctactacgcgtcctggtatcagcagaag |
| | | ccggggcaggccccagtcctcgtcatctacggaaagaacaataggcccagcggaatccctgaccgc |
| | | ttctcgggctcatcctccggcaacaccgcctccctgaccatcacgggcgcgcaggccgaggacgaa |
| | | gccgattactactgcaactcacgggattccagcggatgggtgttcggaggaggaaccaagctcact |
| | | gtgctcaccactaccccagcaccgaggccacccaccccggctcctaccatcgcctcccagcctctg |
| | | tccctgcgtccggaggcatgtagacccgcagctggtggggccgtgcatacccggggtcttgacttc |
| | | gcctgcgatatctacatttgggcccctctggctggtacttgcggggtcctgctgctttcactcgtg |
| | | atcactctttactgtaagcgcggtcggaagaagctgctgtacatctttaagcaacccttcatgagg |
| | | cctgtgcagactactcaagaggaggacggctgttcatgccggttcccagaggaggaggaaggcggc |
| | | tgcgaactgcgcgtgaaattcagccgcagcgcagatgctccagcctacaagcaggggcagaaccag |
| | | ctctacaacgaactcaatcttggtcggagagaggagtacgacgtgctggacaagcggagaggacgg |
| | | gacccagaaatgggcgggaagccgcgcagaaagaatccccaagagggcctgtacaacgagctccaa |
| | | aaggataagatggcagaagcctatagcgagattggtatgaaaggggaacgcagaagaggcaaaggc |
| | | cacgacggactgtaccagggactcagcaccgccaccaaggacacctatgacgctcttcacatgcag |
| | | gccctgccgcctcgg |
| CAR22-6 | 232 | evqlqqsgpglvkpsltlsltcaisgdsvssnsatwtwirqspsrglewlgrtyyrstwyndyavs |
| scFv | | vksritinpdtsknqfslqlnsvtpedtavyycaregsgsyyaywgqgtlvtvssggggsggggsg |
| AA | | gggsqsaltqpasvsgspgqsitisctgtssdvggynyvswyqqhpgkapklmiydvsnrpsgvsn |
| | | rfsgsksgntasltisglqaedeadyycssytssstlyvfgtgtkvtvl |
| CAR22-6 | 233 | gaagtgcaactccaacaatcaggtccaggactcgtcaaaccctcgcttactctgtcgctgacttgt |
| scFv NT | | gctatctcgggagactccgtgagctccaacagcgccacctggacttggattagacagtccccgtca |
| | | cggggcctcgaatggctgggaaggacctactaccggagcacctggtacaacgactatgctgtgtcc |
| | | gtgaagtcccgcatcaccatcaaccccgatacctccaagaaccagttcagcttgcaactgaactcc |
| | | gtgacccctgaggatacggccgtctattactgcgcccgcgaggggtccggttcctactacgcctac |
| | | tggggacagggtactctggtcaccgtgtcgagcggagggggggggtccggcggaggaggatctggt |
| | | ggcggaggctcccagtccgcgctgacccagcctgcgtccgtgtccggctcaccgggccagtctatc |
| | | accattagctgcaccggcactagctcagacgtgggagggtacaactacgtgtcgtggtaccagcag |
| | | caccctggaaaggccccgaagctgatgatctacgacgtgtccaaccggcccagcggggtgtcgaat |
| | | cgcttctccggctcaaagtccggcaacacagccagcctgaccattagcggactgcaggccgaggat |
| | | gaagcagactactactgctcgtcctacacctcctcctcgactctctacgtgtttggcaccggaact |
| | | aaggtcaccgtgctg |
| CAR22-6 | 234 | atggccctccctgtcaccgccctgctgcttccgctggctcttctgctccacgccgctcggcccgaa |
| soluble | | gtgcaactccaacaatcaggtccaggactcgtcaaaccctcgcttactctgtcgctgacttgtgct |
| scFV NT | | atctcgggagactccgtgagctccaacagcgccacctggacttggattagacagtccccgtcacgg |
| | | ggcctcgaatggctgggaaggacctactaccggagcacctggtacaacgactatgctgtgtccgtg |
| | | aagtcccgcatcaccatcaaccccgatacctccaagaaccagttcagcttgcaactgaactccgtg |
| | | acccctgaggatacggccgtctattactgcgcccgcgaggggtccggttcctactacgcctactgg |
| | | ggacagggtactctggtcaccgtgtcgagcggagggggggggtccggcggaggaggatctggtggc |
| | | ggaggctcccagtccgcgctgacccagcctgcgtccgtgtccggctcaccgggccagtctatcacc |
| | | attagctgcaccggcactagctcagacgtgggagggtacaactacgtgtcgtggtaccagcagcac |
| | | cctggaaaggccccgaagctgatgatctacgacgtgtccaaccggcccagcggggtgtcgaatcgc |
| | | ttctccggctcaaagtccggcaacacagccagcctgaccattagcggactgcaggccgaggatgaa |
| | | gcagactactactgctcgtcctacacctcctcctcgactctctacgtgtttggcaccggaactaag |
| | | gtcaccgtgctgggatcgcaccaccatcaccatcatcatcac |
| CAR22-6 | 235 | malpvtalllplalllhaarpevqlqqsgpglvkpsltlsltcaisgdsvssnsatwtwirqspsr |
| soluble | | glewlgrtyyrstwyndyavsvksritinpdtsknqfslqlnsvtpedtavyycaregsgsyyayw |
| scFV AA | | gqgtlvtvssggggsggggsggggsqsaltqpasvsgspgqsitisctgtssdvggynyvswyqqh |
| | | pgkapklmiydvsnrpsgvsnrfsgsksgntasltisglqaedeadyycssytssstlyvfgtgtk |
| | | vtvlgshhhhhhhhh |
| CAR22-6 | 236 | malpvtalllplalllhaarpevqlqqsgpglvkpsltlsltcaisgdsvssnsatwtwirqspsr |
| Full AA | | glewlgrtyyrstwyndyavsvksritinpdtsknqfslqlnsvtpedtavyycaregsgsyyayw |
| | | gqgtlvtvssggggsggggsggggsqsaltqpasvsgspgqsitisctgtssdvggynyvswyqqh |
| | | pgkapklmiydvsnrpsgvsnrfsgsksgntasltisglqaedeadyycssytssstlyvfgtgtk |
| | | vtvltttpaprpptpaptiasqplslrpeacrpaaggavhtrgldfacdiyiwaplagtcgvllls |
| | | lvitlyckrgrkkllyifkqpfmrpvqttqeedgcscrfpeeeeggcelrvkfsrsadapaykqgq |
| | | nqlynelnlgrreeydvldkrrgrdpemggkprrknpqeglynelqkdkmaeayseigmkgerrrg |
| | | kghdglyqglstatkdtydalhmqalppr |
| CAR22-6 | 237 | atggccctccctgtcaccgccctgctgcttccgctggctcttctgctccacgccgctcggcccgaa |
| Full NT | | gtgcaactccaacaatcaggtccaggactcgtcaaaccctcgcttactctgtcgctgacttgtgct |
| lentivirus | | atctcgggagactccgtgagctccaacagcgccacctggacttggattagacagtccccgtcacgg |
| | | ggcctcgaatggctgggaaggacctactaccggagcacctggtacaacgactatgctgtgtccgtg |
| | | aagtcccgcatcaccatcaaccccgatacctccaagaaccagttcagcttgcaactgaactccgtg |
| | | acccctgaggatacggccgtctattactgcgcccgcgaggggtccggttcctactacgcctactgg |
| | | ggacagggtactctggtcaccgtgtcgagcggagggggggggtccggcggaggaggatctggtggc |
| | | ggaggctcccagtccgcgctgacccagcctgcgtccgtgtccggctcaccgggccagtctatcacc |
| | | attagctgcaccggcactagctcagacgtgggagggtacaactacgtgtcgtggtaccagcagcac |
| | | cctggaaaggccccgaagctgatgatctacgacgtgtccaaccggcccagcggggtgtcgaatcgc |
| | | ttctccggctcaaagtccggcaacacagccagcctgaccattagcggactgcaggccgaggatgaa |
| | | gcagactactactgctcgtcctacacctcctcctcgactctctacgtgtttggcaccggaactaag |
| | | gtcaccgtgctgaccactaccccagcaccgaggccacccaccccggctcctaccatcgcctcccag |
| | | cctctgtccctgcgtccggaggcatgtagacccgcagctggtggggccgtgcatacccggggtctt |
| | | gacttcgcctgcgatatctacatttgggcccctctggctggtacttgcggggtcctgctgctttca |
| | | ctcgtgatcactctttactgtaagcgcggtcggaagaagctgctgtacatctttaagcaacccttc |
| | | atgaggcctgtgcagactactcaagaggaggacggctgttcatgccggttcccagaggaggaggaa |
| | | ggcggctgcgaactgcgcgtgaaattcagccgcagcgcagatgctccagcctacaagcaggggcag |
| | | aaccagctctacaacgaactcaatcttggtcggagagaggagtacgacgtgctggacaagcggaga |
| | | ggacgggacccagaaatgggcgggaagccgcgcagaaagaatccccaagagggcctgtacaacgag |
| | | ctccaaaaggataagatggcagaagcctatagcgagattggtatgaaaggggaacgcagaagaggc |
| | | aaaggccacgacggactgtaccagggactcagcaccgccaccaaggacacctatgacgctcttcac |
| | | atgcaggccctgccgcctcgg |
| CAR22-7 | 238 | qvqlvqsgaevkkpgasvkvsckasgytftgyymhwvrqapgqglewmgwinpnsggtnyaqkfqg |
| scFv | | rvtmtrdtsistaymelsrlrsddtavyycardywgyygsgtldywgqgtlvtvssggggsggggs |
| AA | | ggggsqsaltqpgsvsgspgqsitisctgtssdvggynyvswyqqhpgkapkliiydvssrpsgvs |
| | | nrfsgsqsgntasltisglqaedeadyscssyagsntlvfgtgtkvtvl |
| CAR22-7 | 239 | caagtccaactcgtccagtccggtgcagaagtcaagaagccaggagcgtccgtgaaagtgtcctgc |
| scFv NT | | aaagcctcgggctacaccttcaccggatactacatgcactgggtgcgccaggctcccggacaagga |
| | | ttggagtggatgggttggatcaacccgaactccggcggaaccaactacgcccagaagttccaggga |
| | | cgcgtgactatgactcgggacacgtccatcagcactgcctacatggaactgagccggcttagatca |
| | | gacgacaccgccgtgtactactgcgcccgcgattactggggctactacggaagcggaaccctcgac |
| | | tactggggacagggaactctcgtgactgtgtcgagcggtggaggcggctccggcggagggggttcc |
| | | ggtggtggaggctcccagtccgcgctgacccagcctgggtcggtgtccggctcacctggccaatcc |
| | | atcaccatttcctgcaccggcacttcctccgacgtgggagggtacaactacgtgtcgtggtaccag |
| | | cagcatccgggaaaggcccccaagctgatcatctacgatgtgtcgtcccggccgagcggagtgtca |
| | | aacaggtttagcgggagccagtccgggaatactgcctcgctgacaattagcgggctgcaggctgag |
| | | gacgaggccgattattcgtgttcctcatatgcgggctctaacaccctggtgttcggcaccgggacc |
| | | aaggtcaccgtgctg |
| CAR22-7 | 240 | atggccctccctgtcaccgccctgctgcttccgctggctcttctgctccacgccgctcggccccaa |
| soluble | | gtccaactcgtccagtccggtgcagaagtcaagaagccaggagcgtccgtgaaagtgtcctgcaaa |
| scFV NT | | gcctcgggctacaccttcaccggatactacatgcactgggtgcgccaggctcccggacaaggattg |
| | | gagtggatgggttggatcaacccgaactccggcggaaccaactacgcccagaagttccagggacgc |
| | | gtgactatgactcgggacacgtccatcagcactgcctacatggaactgagccggcttagatcagac |
| | | gacaccgccgtgtactactgcgcccgcgattactggggctactacggaagcggaaccctcgactac |
| | | tggggacagggaactctcgtgactgtgtcgagcggtggaggcggctccggcggagggggttccggt |
| | | ggtggaggctcccagtccgcgctgacccagcctgggtcggtgtccggctcacctggccaatccatc |
| | | accatttcctgcaccggcacttcctccgacgtgggagggtacaactacgtgtcgtggtaccagcag |
| | | catccgggaaaggcccccaagctgatcatctacgatgtgtcgtcccggccgagcggagtgtcaaac |
| | | aggtttagcgggagccagtccgggaatactgcctcgctgacaattagcgggctgcaggctgaggac |
| | | gaggccgattattcgtgttcctcatatgcgggctctaacaccctggtgttcggcaccgggaccaag |
| | | gtcaccgtgctgggatcgcaccaccatcaccatcatcatcac |
| CAR22-7 | 241 | malpvtalllplalllhaarpqvqlvqsgaevkkpgasvkvsckasgytftgyymhwvrqapgqgl |
| soluble | | ewmgwinpnsggtnyaqkfqgrvtmtrdtsistaymelsrlrsddtavyycardywgyygsgtldy |
| scFV AA | | wgqgtlvtvssggggsggggsggggsqsaltqpgsvsgspgqsitisctgtssdvggynyvswyqq |
| | | hpgkapkliiydvssrpsgvsnrfsgsqsgntasltisglqaedeadyscssyagsntlvfgtgtk |
| | | vtvlgshhhhhhhhh |
| CAR22-7 | 242 | malpvtalllplalllhaarpqvqlvqsgaevkkpgasvkvsckasgytftgyymhwvrqapgqgl |
| Full AA | | ewmgwinpnsggtnyaqkfqgrvtmtrdtsistaymelsrlrsddtavyycardywgyygsgtldy |
| | | wgqgtlvtvssggggsggggsggggsqsaltqpgsvsgspgqsitisctgtssdvggynyvswyqq |
| | | hpgkapkliiydvssrpsgvsnrfsgsqsgntasltisglqaedeadyscssyagsntlvfgtgtk |
| | | vtvltttpaprpptpaptiasqplslrpeacrpaaggavhtrgldfacdiyiwaplagtcgvllls |
| | | lvitlyckrgrkkllyifkqpfmrpvqttqeedgcscrfpeeeeggcelrvkfsrsadapaykqgq |
| | | nqlynelnlgrreeydvldkrrgrdpemggkprrknpqeglynelqkdkmaeayseigmkgerrrg |
| | | kghdglyqglstatkdtydalhmqalppr |
| CAR22-7 | 243 | atggccctccctgtcaccgccctgctgcttccgctggctcttctgctccacgccgctcggccccaa |
| Full NT | | gtccaactcgtccagtccggtgcagaagtcaagaagccaggagcgtccgtgaaagtgtcctgcaaa |
| lentivirus | | gcctcgggctacaccttcaccggatactacatgcactgggtgcgccaggctcccggacaaggattg |
| | | gagtggatgggttggatcaacccgaactccggcggaaccaactacgcccagaagttccagggacgc |
| | | gtgactatgactcgggacacgtccatcagcactgcctacatggaactgagccggcttagatcagac |
| | | gacaccgccgtgtactactgcgcccgcgattactggggctactacggaagcggaaccctcgactac |
| | | tggggacagggaactctcgtgactgtgtcgagcggtggaggcggctccggcggagggggttccggt |
| | | ggtggaggctcccagtccgcgctgacccagcctgggtcggtgtccggctcacctggccaatccatc |
| | | accatttcctgcaccggcacttcctccgacgtgggagggtacaactacgtgtcgtggtaccagcag |
| | | catccgggaaaggcccccaagctgatcatctacgatgtgtcgtcccggccgagcggagtgtcaaac |
| | | aggtttagcgggagccagtccgggaatactgcctcgctgacaattagcgggctgcaggctgaggac |
| | | gaggccgattattcgtgttcctcatatgcgggctctaacaccctggtgttcggcaccgggaccaag |
| | | gtcaccgtgctgaccactaccccagcaccgaggccacccaccccggctcctaccatcgcctcccag |
| | | cctctgtccctgcgtccggaggcatgtagacccgcagctggtggggccgtgcatacccggggtctt |
| | | gacttcgcctgcgatatctacatttgggcccctctggctggtacttgcggggtcctgctgctttca |
| | | ctcgtgatcactctttactgtaagcgcggtcggaagaagctgctgtacatctttaagcaacccttc |
| | | atgaggcctgtgcagactactcaagaggaggacggctgttcatgccggttcccagaggaggaggaa |
| | | ggcggctgcgaactgcgcgtgaaattcagccgcagcgcagatgctccagcctacaagcaggggcag |
| | | aaccagctctacaacgaactcaatcttggtcggagagaggagtacgacgtgctggacaagcggaga |
| | | ggacgggacccagaaatgggcgggaagccgcgcagaaagaatccccaagagggcctgtacaacgag |
| | | ctccaaaaggataagatggcagaagcctatagcgagattggtatgaaaggggaacgcagaagaggc |
| | | aaaggccacgacggactgtaccagggactcagcaccgccaccaaggacacctatgacgctcttcac |
| | | atgcaggccctgccgcctcgg |
| CAR22-8 | 244 | qvqlvqsgaevkkpgasvkvsckasgytftsygiswvrqapgqglewmgwisayngntnyaqklqg |
| scFv | | rvtmttdtststaymelrslrsddtavyycaraglalysnyvpyyyygmdvwgqgttvtvssgggg |
| AA | | sggggsggggsnfmltqphsvsespgktvtisctrssgsiasnyvqwyqqrpgsspttviyednqr |
| | | psgvpdrfsgsidsssnsasltisglktedeadyycqsydssnpwvfgggtkltvl |
| CAR22-8 | 245 | caagtccaactggtgcagtcgggagccgaagtcaagaagccgggggcctccgtcaaagtgtcctgc |
| scFv NT | | aaagccagcggctacactttcacctcctatgggatctcatgggtcagacaggctcccggccaagga |
| | | ctggaatggatgggttggatctccgcctacaacggcaacactaactacgcccagaagctgcagggg |
| | | agagtgaccatgacaactgacacctcgacctcaaccgcgtacatggaactgcgcagccttaggtcc |
| | | gacgatacggcggtgtactattgtgcacgggccggcttggccctctactcgaactacgtgccctac |
| | | tactactacggaatggacgtctggggacagggaaccactgtgaccgtgtcctccgggggtggaggc |
| | | tcaggcggaggaggaagcggcgggggtggaagcaactttatgctgacccagcctcactcggtgtcg |
| | | gagagccctggaaagactgtgaccatctcctgcactcggagctcgggctccattgcgtcaaactac |
| | | gtgcagtggtaccagcagcgccccggttcctcgccaaccaccgtgatctacgaggacaaccaacgc |
| | | ccgtccggggtgcctgaccggttctccggctccatcgattcctcttccaactccgcttccctgacc |
| | | attagcggcctcaagaccgaggatgaagccgactactactgccagtcctacgactcaagcaatccg |
| | | tgggtgttcggtggaggaactaagctgaccgtgctc |
| CAR22-8 | 246 | atggccctccctgtcaccgccctgctgcttccgctggctcttctgctccacgccgctcggccccaa |
| soluble | | gtccaactggtgcagtcgggagccgaagtcaagaagccgggggcctccgtcaaagtgtcctgcaaa |
| scFV NT | | gccagcggctacactttcacctcctatgggatctcatgggtcagacaggctcccggccaaggactg |
| | | gaatggatgggttggatctccgcctacaacggcaacactaactacgcccagaagctgcaggggaga |
| | | gtgaccatgacaactgacacctcgacctcaaccgcgtacatggaactgcgcagccttaggtccgac |
| | | gatacggcggtgtactattgtgcacgggccggcttggccctctactcgaactacgtgccctactac |
| | | tactacggaatggacgtctggggacagggaaccactgtgaccgtgtcctccgggggtggaggctca |
| | | ggcggaggaggaagcggcgggggtggaagcaactttatgctgacccagcctcactcggtgtcggag |
| | | agccctggaaagactgtgaccatctcctgcactcggagctcgggctccattgcgtcaaactacgtg |
| | | cagtggtaccagcagcgccccggttcctcgccaaccaccgtgatctacgaggacaaccaacgcccg |
| | | tccggggtgcctgaccggttctccggctccatcgattcctcttccaactccgcttccctgaccatt |
| | | agcggcctcaagaccgaggatgaagccgactactactgccagtcctacgactcaagcaatccgtgg |
| | | gtgttcggtggaggaactaagctgaccgtgctcggatcgcaccaccatcaccatcatcatcac |
| CAR22-8 | 247 | malpvtalllplalllhaarpqvqlvqsgaevkkpgasvkvsckasgytftsygiswvrqapgqgl |
| soluble | | ewmgwisayngntnyaqklqgrvtmttdtststaymelrslrsddtavyycaraglalysnyvpyy |
| scFV AA | | yygmdvwgqgttvtvssggggsggggsggggsnfmltqphsvsespgktvtisctrssgsiasnyv |
| | | qwyqqrpgsspttviyednqrpsgvpdrfsgsidsssnsasltisglktedeadyycqsydssnpw |
| | | vfgggtkltvlgshhhhhhhh |
| CAR22-8 | 248 | malpvtalllplalllhaarpqvqlvqsgaevkkpgasvkvsckasgytftsygiswvrqapgqgl |
| Full AA | | ewmgwisayngntnyaqklqgrvtmttdtststaymelrslrsddtavyycaraglalysnyvpyy |
| | | yygmdvwgqgttvtvssggggsggggsggggsnfmltqphsvsespgktvtisctrssgsiasnyv |
| | | qwyqqrpgsspttviyednqrpsgvpdrfsgsidsssnsasltisglktedeadyycqsydssnpw |
| | | vfgggtkltvltttpaprpptpaptiasqplslrpeacrpaaggavhtrgldfacdiyiwaplagt |
| | | cgvlllslvitlyckrgrkkllyifkqpfmrpvqttqeedgcscrfpeeeeggcelrvkfsrsada |
| | | paykqgqnqlynelnlgrreeydvldkrrgrdpemggkprrknpqeglynelqkdkmaeayseigm |
| | | kgerrrgkghdglyqglstatkdtydalhmqalppr |
| CAR22-8 | 249 | atggccctccctgtcaccgccctgctgcttccgctggctcttctgctccacgccgctcggccccaa |
| Full NT | | gtccaactggtgcagtcgggagccgaagtcaagaagccgggggcctccgtcaaagtgtcctgcaaa |
| lentivirus | | gccagcggctacactttcacctcctatgggatctcatgggtcagacaggctcccggccaaggactg |
| | | gaatggatgggttggatctccgcctacaacggcaacactaactacgcccagaagctgcaggggaga |
| | | gtgaccatgacaactgacacctcgacctcaaccgcgtacatggaactgcgcagccttaggtccgac |
| | | gatacggcggtgtactattgtgcacgggccggcttggccctctactcgaactacgtgccctactac |
| | | tactacggaatggacgtctggggacagggaaccactgtgaccgtgtcctccgggggtggaggctca |
| | | ggcggaggaggaagcggcgggggtggaagcaactttatgctgacccagcctcactcggtgtcggag |
| | | agccctggaaagactgtgaccatctcctgcactcggagctcgggctccattgcgtcaaactacgtg |
| | | cagtggtaccagcagcgccccggttcctcgccaaccaccgtgatctacgaggacaaccaacgcccg |
| | | tccggggtgcctgaccggttctccggctccatcgattcctcttccaactccgcttccctgaccatt |
| | | agcggcctcaagaccgaggatgaagccgactactactgccagtcctacgactcaagcaatccgtgg |
| | | gtgttcggtggaggaactaagctgaccgtgctcaccactaccccagcaccgaggccacccaccccg |
| | | gctcctaccatcgcctcccagcctctgtccctgcgtccggaggcatgtagacccgcagctggtggg |
| | | gccgtgcatacccggggtcttgacttcgcctgcgatatctacatttgggcccctctggctggtact |
| | | tgcggggtcctgctgctttcactcgtgatcactctttactgtaagcgcggtcggaagaagctgctg |
| | | tacatctttaagcaacccttcatgaggcctgtgcagactactcaagaggaggacggctgttcatgc |
| | | cggttcccagaggaggaggaaggcggctgcgaactgcgcgtgaaattcagccgcagcgcagatgct |
| | | ccagcctacaagcaggggcagaaccagctctacaacgaactcaatcttggtcggagagaggagtac |
| | | gacgtgctggacaagcggagaggacgggacccagaaatgggcgggaagccgcgcagaaagaatccc |
| | | caagagggcctgtacaacgagctccaaaaggataagatggcagaagcctatagcgagattggtatg |
| | | aaaggggaacgcagaagaggcaaaggccacgacggactgtaccagggactcagcaccgccaccaag |
| | | gacacctatgacgctcttcacatgcaggccctgccgcctcgg |
| CAR22-9 | 250 | evqlvesggglvkpggslrlscvasgftfsnawmnwvrqapgkglewvgriksktdggtadyaapv |
| scFv | | kgrftisrddskntmylqmnslktedtgvyycitgatdvwgqgttvtvssggggsggggsggggss |
| AA | | yvltqppsasgtpgqrvtiscsgsssnigsnyvywyqqlpgtapklliyrnnqrpsgvpdrfsgsk |
| | | sgtsaslaisglrsedeadyycaawddslsgpvfgggtkltvl |
| CAR22-9 | 251 | gaagtgcagctcgtggaatcgggcggtggactggtcaagccaggaggttccctgcggctgtcctgc |
| scFv NT | | gtggcctccggtttcacattctccaacgcgtggatgaattgggtgcgccaagcccctggaaaggga |
| | | cttgaatgggtcggacggatcaagagcaaaaccgacggaggaactgccgattacgccgcacccgtg |
| | | aagggcagattcaccatttcgcgggatgactcgaagaacaccatgtacctccagatgaactcgctc |
| | | aagaccgaggataccggcgtctactactgcatcaccggcgctactgacgtctggggacagggaact |
| | | accgtgactgtgtcctccggcggaggcggaagcggaggagggggcagcgggggcgggggatcatcc |
| | | tacgtgctcactcagccgccttcagcctccggtaccccgggccagcgcgtgaccatttcatgctcg |
| | | ggctcctcctcaaacatcgggagcaactacgtgtactggtaccagcagctgcccggtactgccccc |
| | | aagctgctgatctaccggaacaaccaacgcccgagcggagtgccggacagattctccgggtccaag |
| | | tctgggacctccgctagcctggcgatctccggtctgaggagcgaggacgaggcagactactattgt |
| | | gcggcctgggacgattccctgtcggggcctgtgtttggaggcggcacgaagttgaccgtgctg |
| CAR22-9 | 252 | atggccctccctgtcaccgccctgctgcttccgctggctcttctgctccacgccgctcggcccgaa |
| soluble | | gtgcagctcgtggaatcgggcggtggactggtcaagccaggaggttccctgcggctgtcctgcgtg |
| scFV NT | | gcctccggtttcacattctccaacgcgtggatgaattgggtgcgccaagcccctggaaagggactt |
| | | gaatgggtcggacggatcaagagcaaaaccgacggaggaactgccgattacgccgcacccgtgaag |
| | | ggcagattcaccatttcgcgggatgactcgaagaacaccatgtacctccagatgaactcgctcaag |
| | | accgaggataccggcgtctactactgcatcaccggcgctactgacgtctggggacagggaactacc |
| | | gtgactgtgtcctccggcggaggcggaagcggaggagggggcagcgggggcgggggatcatcctac |
| | | gtgctcactcagccgccttcagcctccggtaccccgggccagcgcgtgaccatttcatgctcgggc |
| | | tcctcctcaaacatcgggagcaactacgtgtactggtaccagcagctgcccggtactgcccccaag |
| | | ctgctgatctaccggaacaaccaacgcccgagcggagtgccggacagattctccgggtccaagtct |
| | | gggacctccgctagcctggcgatctccggtctgaggagcgaggacgaggcagactactattgtgcg |
| | | gcctgggacgattccctgtcggggcctgtgtttggaggcggcacgaagttgaccgtgctgggatcg |
| | | caccaccatcaccatcatcatcac |
| CAR22-9 | 253 | malpvtalllplalllhaarpevqlvesggglvkpggslrlscvasgftfsnawmnwvrqapgkgl |
| soluble | | ewvgriksktdggtadyaapvkgrftisrddskntmylqmnslktedtgvyycitgatdvwgqgtt |
| scFV AA | | vtvssggggsggggsggggssyvltqppsasgtpgqrvtiscsgsssnigsnyvywyqqlpgtapk |
| | | lliyrnnqrpsgvpdrfsgsksgtsaslaisglrsedeadyycaawddslsgpvfgggtkltvlgs |
| | | hhhhhhhh |
| CAR22-9 | 254 | malpvtalllplalllhaarpevqlvesggglvkpggslrlscvasgftfsnawmnwvrqapgkgl |
| Full AA | | ewvgriksktdggtadyaapvkgrftisrddskntmylqmnslktedtgvyycitgatdvwgqgtt |
| | | vtvssggggsggggsggggssyvltqppsasgtpgqrvtiscsgsssnigsnyvywyqqlpgtapk |
| | | lliyrnnqrpsgvpdrfsgsksgtsaslaisglrsedeadyycaawddslsgpvfgggtkltvltt |
| | | tpaprpptpaptiasqplslrpeacrpaaggavhtrgldfacdiyiwaplagtcgvlllslvitly |
| | | ckrgrkkllyifkqpfmrpvqttqeedgcscrfpeeeeggcelrvkfsrsadapaykqgqnqlyne |
| | | lnlgrreeydvldkrrgrdpemggkprrknpqeglynelqkdkmaeayseigmkgerrrgkghdgl |
| | | yqglstatkdtydalhmqalppr |
| CAR22-9 | 255 | atggccctccctgtcaccgccctgctgcttccgctggctcttctgctccacgccgctcggcccgaa |
| Full NT | | gtgcagctcgtggaatcgggcggtggactggtcaagccaggaggttccctgcggctgtcctgcgtg |
| lentivirus | | gcctccggtttcacattctccaacgcgtggatgaattgggtgcgccaagcccctggaaagggactt |
| | | gaatgggtcggacggatcaagagcaaaaccgacggaggaactgccgattacgccgcacccgtgaag |
| | | ggcagattcaccatttcgcgggatgactcgaagaacaccatgtacctccagatgaactcgctcaag |
| | | accgaggataccggcgtctactactgcatcaccggcgctactgacgtctggggacagggaactacc |
| | | gtgactgtgtcctccggcggaggcggaagcggaggagggggcagcgggggcgggggatcatcctac |
| | | gtgctcactcagccgccttcagcctccggtaccccgggccagcgcgtgaccatttcatgctcgggc |
| | | tcctcctcaaacatcgggagcaactacgtgtactggtaccagcagctgcccggtactgcccccaag |
| | | ctgctgatctaccggaacaaccaacgcccgagcggagtgccggacagattctccgggtccaagtct |
| | | gggacctccgctagcctggcgatctccggtctgaggagcgaggacgaggcagactactattgtgcg |
| | | gcctgggacgattccctgtcggggcctgtgtttggaggcggcacgaagttgaccgtgctgaccact |
| | | accccagcaccgaggccacccaccccggctcctaccatcgcctcccagcctctgtccctgcgtccg |
| | | gaggcatgtagacccgcagctggtggggccgtgcatacccggggtcttgacttcgcctgcgatatc |
| | | tacatttgggcccctctggctggtacttgcggggtcctgctgctttcactcgtgatcactctttac |
| | | tgtaagcgcggtcggaagaagctgctgtacatctttaagcaacccttcatgaggcctgtgcagact |
| | | actcaagaggaggacggctgttcatgccggttcccagaggaggaggaaggcggctgcgaactgcgc |
| | | gtgaaattcagccgcagcgcagatgctccagcctacaagcaggggcagaaccagctctacaacgaa |
| | | ctcaatcttggtcggagagaggagtacgacgtgctggacaagcggagaggacgggacccagaaatg |
| | | ggcgggaagccgcgcagaaagaatccccaagagggcctgtacaacgagctccaaaaggataagatg |
| | | gcagaagcctatagcgagattggtatgaaaggggaacgcagaagaggcaaaggccacgacggactg |
| | | taccagggactcagcaccgccaccaaggacacctatgacgctcttcacatgcaggccctgccgcct |
| | | cgg |
| CAR22-10 | 256 | evqlqqsgpglvkpsqtlsltcaisgdsvlsnsdtwnwirqspsrglewlgrtyhrstwyddyass |
| scFv | | vrgrvsinvdtsknqyslqlnavtpedtgvyycardrlqdgnswsdafdvwgqgtmvtvssggggs |
| AA | | ggggsggggsqsaltqpasvsgspgqsitisctgtssdvggynyvswyqqhpgkapklmiydvsnr |
| | | psgvsnrfsgsksgntasltisglqaedeadyycssytssstlvyvfgtgtkvtvl |
| CAR22-10 | 257 | gaagtgcagcttcagcagtctggtcccgggcttgtcaaaccatcgcagaccctgtccctgacttgc |
| scFv NT | | gcgatcagcggcgatagcgtgctgtcaaactcggacacctggaactggatcaggcagtccccttcc |
| | | cgcggactggaatggttgggccggacgtaccatcgctccacttggtacgacgactatgccagctcc |
| | | gtgagaggccgggtgtcgatcaacgtggatacttcaaagaaccagtactccctccaactcaatgct |
| | | gtgaccccggaggacaccggagtgtactactgtgcccgggatagactgcaggacggaaactcatgg |
| | | agcgacgccttcgacgtgtggggacagggcaccatggtcaccgtgtccagcggtggaggaggctcc |
| | | ggcggtggaggttcggggggaggagggagccaatcggctctgacccaaccggcctcagtcagcggt |
| | | tcgcccggacagtccattactattagctgcaccggaacctccagcgacgtgggcggctacaactat |
| | | gtgtcgtggtaccagcagcacccggggaaggcccctaagctgatgatctacgacgtgtccaatcgg |
| | | ccctccggggtgtccaaccgcttctccggctcgaagtccggcaacactgcatcactgacaatcagc |
| | | ggactgcaagccgaggacgaagcggattactactgctcctcctacacctcctcctccactctcgtc |
| | | tacgtgtttggaaccgggaccaaggtcaccgtgctg |
| CAR22-10 | 258 | atggccctccctgtcaccgccctgctgcttccgctggctcttctgctccacgccgctcggcccgaa |
| soluble | | gtgcagcttcagcagtctggtcccgggcttgtcaaaccatcgcagaccctgtccctgacttgcgcg |
| scFV NT | | atcagcggcgatagcgtgctgtcaaactcggacacctggaactggatcaggcagtccccttcccgc |
| | | ggactggaatggttgggccggacgtaccatcgctccacttggtacgacgactatgccagctccgtg |
| | | agaggccgggtgtcgatcaacgtggatacttcaaagaaccagtactccctccaactcaatgctgtg |
| | | accccggaggacaccggagtgtactactgtgcccgggatagactgcaggacggaaactcatggagc |
| | | gacgccttcgacgtgtggggacagggcaccatggtcaccgtgtccagcggtggaggaggctccggc |
| | | ggtggaggttcggggggaggagggagccaatcggctctgacccaaccggcctcagtcagcggttcg |
| | | cccggacagtccattactattagctgcaccggaacctccagcgacgtgggcggctacaactatgtg |
| | | tcgtggtaccagcagcacccggggaaggcccctaagctgatgatctacgacgtgtccaatcggccc |
| | | tccggggtgtccaaccgcttctccggctcgaagtccggcaacactgcatcactgacaatcagcgga |
| | | ctgcaagccgaggacgaagcggattactactgctcctcctacacctcctcctccactctcgtctac |
| | | gtgtttggaaccgggaccaaggtcaccgtgctgggatcgcaccaccatcaccatcatcatcac |
| CAR22-10 | 259 | malpvtalllplalllhaarpevqlqqsgpglvkpsqtlsltcaisgdsvlsnsdtwnwirqspsr |
| soluble | | glewlgrtyhrstwyddyassvrgrvsinvdtsknqyslqlnavtpedtgvyycardrlqdgnsws |
| scFV AA | | dafdvwgqgtmvtvssggggsggggsggggsqsaltqpasvsgspgqsitisctgtssdvggynyv |
| | | swyqqhpgkapklmiydvsnrpsgvsnrfsgsksgntasltisglqaedeadyycssytssstlvy |
| | | vfgtgtkvtvlgshhhhhhhh |
| CAR22-10 | 260 | malpvtalllplalllhaarpevqlqqsgpglvkpsqtlsltcaisgdsvlsnsdtwnwirqspsr |
| Full AA | | glewlgrtyhrstwyddyassvrgrvsinvdtsknqyslqlnavtpedtgvyycardrlqdgnsws |
| | | dafdvwgqgtmvtvssggggsggggsggggsqsaltqpasvsgspgqsitisctgtssdvggynyv |
| | | swyqqhpgkapklmiydvsnrpsgvsnrfsgsksgntasltisglqaedeadyycssytssstlvy |
| | | vfgtgtkvtvltttpaprpptpaptiasqplslrpeacrpaaggavhtrgldfacdiyiwaplagt |
| | | cgvlllslvitlyckrgrkkllyifkqpfmrpvqttqeedgcscrfpeeeeggcelrvkfsrsada |
| | | paykqgqnqlynelnlgrreeydvldkrrgrdpemggkprrknpqeglynelqkdkmaeayseigm |
| | | kgerrrgkghdglyqglstatkdtydalhmqalppr |
| CAR22-10 | 261 | atggccctccctgtcaccgccctgctgcttccgctggctcttctgctccacgccgctcggcccgaa |
| Full NT | | gtgcagcttcagcagtctggtcccgggcttgtcaaaccatcgcagaccctgtccctgacttgcgcg |
| lentivirus | | atcagcggcgatagcgtgctgtcaaactcggacacctggaactggatcaggcagtccccttcccgc |
| | | ggactggaatggttgggccggacgtaccatcgctccacttggtacgacgactatgccagctccgtg |
| | | agaggccgggtgtcgatcaacgtggatacttcaaagaaccagtactccctccaactcaatgctgtg |
| | | accccggaggacaccggagtgtactactgtgcccgggatagactgcaggacggaaactcatggagc |
| | | gacgccttcgacgtgtggggacagggcaccatggtcaccgtgtccagcggtggaggaggctccggc |
| | | ggtggaggttcggggggaggagggagccaatcggctctgacccaaccggcctcagtcagcggttcg |
| | | cccggacagtccattactattagctgcaccggaacctccagcgacgtgggcggctacaactatgtg |
| | | tcgtggtaccagcagcacccggggaaggcccctaagctgatgatctacgacgtgtccaatcggccc |
| | | tccggggtgtccaaccgcttctccggctcgaagtccggcaacactgcatcactgacaatcagcgga |
| | | ctgcaagccgaggacgaagcggattactactgctcctcctacacctcctcctccactctcgtctac |
| | | gtgtttggaaccgggaccaaggtcaccgtgctgaccactaccccagcaccgaggccacccaccccg |
| | | gctcctaccatcgcctcccagcctctgtccctgcgtccggaggcatgtagacccgcagctggtggg |
| | | gccgtgcatacccggggtcttgacttcgcctgcgatatctacatttgggcccctctggctggtact |
| | | tgcggggtcctgctgctttcactcgtgatcactctttactgtaagcgcggtcggaagaagctgctg |
| | | tacatctttaagcaacccttcatgaggcctgtgcagactactcaagaggaggacggctgttcatgc |
| | | cggttcccagaggaggaggaaggcggctgcgaactgcgcgtgaaattcagccgcagcgcagatgct |
| | | ccagcctacaagcaggggcagaaccagctctacaacgaactcaatcttggtcggagagaggagtac |
| | | gacgtgctggacaagcggagaggacgggacccagaaatgggcgggaagccgcgcagaaagaatccc |
| | | caagagggcctgtacaacgagctccaaaaggataagatggcagaagcctatagcgagattggtatg |
| | | aaaggggaacgcagaagaggcaaaggccacgacggactgtaccagggactcagcaccgccaccaag |
| | | gacacctatgacgctcttcacatgcaggccctgccgcctcgg |
| CAR22-11 | 262 | evqlqqsgpglvkpsqtlsltcaisgdsvssnsaawnwirqspsrglewlgrtyyrskwyndyavs |
| scFv | | vksritinpdtsknqfslqlnsvtpedtavyycareesssgwyegnwfdpwgqgtlvtvssggggs |
| AA | | ggggsggggssseltqdpavsvalgqtvritcqgdslrsyyaswyqqkpgqapvlviygknhrpsg |
| | | ipdrfsgsssgdtdsltitgaqaedeadyychsrdssgnhlfgggtkltvl |
| CAR22-11 | 263 | gaagtgcaacttcagcagtccggtcctggcttggtcaagccgtcacagaccctgtcgctgacttgt |
| scFv NT | | gctattagcggggactctgtgtcctcaaactccgccgcatggaactggattagacagtcgccctcc |
| | | cggggactggagtggctgggccgcacctactaccggtccaagtggtacaatgactacgccgtgtcc |
| | | gtgaagtcccgcattactatcaaccccgacacttcgaagaaccagttttcgctgcaactcaactcc |
| | | gtcacccctgaggataccgccgtgtactattgcgcccgggaagaatcctccagcggttggtacgaa |
| | | ggaaactggttcgacccatggggccagggcaccctggtcactgtgtcctcgggaggagggggcagc |
| | | ggtggcggaggaagcggaggaggaggctccagctccgagctcacccaggacccggcggtgtcagtg |
| | | gccctgggccaaacggtccgcatcacatgccagggggattccctgaggtcatactacgcgagctgg |
| | | tatcagcagaaacccggacaagcccctgtgctcgtgatctacgggaagaaccacaggccgagcgga |
| | | atcccggatagattctccgggtcctcatcgggagacactgacagcctcaccatcaccggcgcgcag |
| | | gccgaggacgaagctgattactactgccattcccgggactcgagcgggaaccaccttttcggtggc |
| | | ggaaccaagctgaccgtgctg |
| CAR22-11 | 264 | atggccctccctgtcaccgccctgctgcttccgctggctcttctgctccacgccgctcggcccgaa |
| soluble | | gtgcaacttcagcagtccggtcctggcttggtcaagccgtcacagaccctgtcgctgacttgtgct |
| scFV NT | | attagcggggactctgtgtcctcaaactccgccgcatggaactggattagacagtcgccctcccgg |
| | | ggactggagtggctgggccgcacctactaccggtccaagtggtacaatgactacgccgtgtccgtg |
| | | aagtcccgcattactatcaaccccgacacttcgaagaaccagttttcgctgcaactcaactccgtc |
| | | acccctgaggataccgccgtgtactattgcgcccgggaagaatcctccagcggttggtacgaagga |
| | | aactggttcgacccatggggccagggcaccctggtcactgtgtcctcgggaggagggggcagcggt |
| | | ggcggaggaagcggaggaggaggctccagctccgagctcacccaggacccggcggtgtcagtggcc |
| | | ctgggccaaacggtccgcatcacatgccagggggattccctgaggtcatactacgcgagctggtat |
| | | cagcagaaacccggacaagcccctgtgctcgtgatctacgggaagaaccacaggccgagcggaatc |
| | | ccggatagattctccgggtcctcatcgggagacactgacagcctcaccatcaccggcgcgcaggcc |
| | | gaggacgaagctgattactactgccattcccgggactcgagcgggaaccaccttttcggtggcgga |
| | | accaagctgaccgtgctgggatcgcaccaccatcaccatcatcatcac |
| CAR22-11 | 265 | malpvtalllplalllhaarpevqlqqsgpglvkpsqtlsltcaisgdsvssnsaawnwirqspsr |
| soluble | | glewlgrtyyrskwyndyavsvksritinpdtsknqfslqlnsvtpedtavyycareesssgwyeg |
| scFV AA | | nwfdpwgqgtlvtvssggggsggggsggggssseltqdpavsvalgqtvritcqgdslrsyyaswy |
| | | qqkpgqapvlviygknhrpsgipdrfsgsssgdtdsltitgaqaedeadyychsrdssgnhlfggg |
| | | tkltvlgshhhhhhhh |
| CAR22-11 | 266 | malpvtalllplalllhaarpevqlqqsgpglvkpsqtlsltcaisgdsvssnsaawnwirqspsr |
| Full AA | | glewlgrtyyrskwyndyavsvksritinpdtsknqfslqlnsvtpedtavyycareesssgwyeg |
| | | nwfdpwgqgtlvtvssggggsggggsggggssseltqdpavsvalgqtvritcqgdslrsyyaswy |
| | | qqkpgqapvlviygknhrpsgipdrfsgsssgdtdsltitgaqaedeadyychsrdssgnhlfggg |
| | | tkltvltttpaprpptpaptiasqplslrpeacrpaaggavhtrgldfacdiyiwaplagtcgvll |
| | | lslvitlyckrgrkkllyifkqpfmrpvqttqeedgcscrfpeeeeggcelrvkfsrsadapaykq |
| | | gqnqlynelnlgrreeydvldkrrgrdpemggkprrknpqeglynelqkdkmaeayseigmkgerr |
| | | rgkghdglyqglstatkdtydalhmqalppr |
| CAR22-11 | 267 | atggccctccctgtcaccgccctgctgcttccgctggctcttctgctccacgccgctcggcccgaa |
| Full NT | | gtgcaacttcagcagtccggtcctggcttggtcaagccgtcacagaccctgtcgctgacttgtgct |
| lentivirus | | attagcggggactctgtgtcctcaaactccgccgcatggaactggattagacagtcgccctcccgg |
| | | ggactggagtggctgggccgcacctactaccggtccaagtggtacaatgactacgccgtgtccgtg |
| | | aagtcccgcattactatcaaccccgacacttcgaagaaccagttttcgctgcaactcaactccgtc |
| | | acccctgaggataccgccgtgtactattgcgcccgggaagaatcctccagcggttggtacgaagga |
| | | aactggttcgacccatggggccagggcaccctggtcactgtgtcctcgggaggagggggcagcggt |
| | | ggcggaggaagcggaggaggaggctccagctccgagctcacccaggacccggcggtgtcagtggcc |
| | | ctgggccaaacggtccgcatcacatgccagggggattccctgaggtcatactacgcgagctggtat |
| | | cagcagaaacccggacaagcccctgtgctcgtgatctacgggaagaaccacaggccgagcggaatc |
| | | ccggatagattctccgggtcctcatcgggagacactgacagcctcaccatcaccggcgcgcaggcc |
| | | gaggacgaagctgattactactgccattcccgggactcgagcgggaaccaccttttcggtggcgga |
| | | accaagctgaccgtgctgaccactaccccagcaccgaggccacccaccccggctcctaccatcgcc |
| | | tcccagcctctgtccctgcgtccggaggcatgtagacccgcagctggtggggccgtgcatacccgg |
| | | ggtcttgacttcgcctgcgatatctacatttgggcccctctggctggtacttgcggggtcctgctg |
| | | ctttcactcgtgatcactctttactgtaagcgcggtcggaagaagctgctgtacatctttaagcaa |
| | | cccttcatgaggcctgtgcagactactcaagaggaggacggctgttcatgccggttcccagaggag |
| | | gaggaaggcggctgcgaactgcgcgtgaaattcagccgcagcgcagatgctccagcctacaagcag |
| | | gggcagaaccagctctacaacgaactcaatcttggtcggagagaggagtacgacgtgctggacaag |
| | | cggagaggacgggacccagaaatgggcgggaagccgcgcagaaagaatccccaagagggcctgtac |
| | | aacgagctccaaaaggataagatggcagaagcctatagcgagattggtatgaaaggggaacgcaga |
| | | agaggcaaaggccacgacggactgtaccagggactcagcaccgccaccaaggacacctatgacgct |
| | | cttcacatgcaggccctgccgcctcgg |
| CAR22-12 | 268 | evqlqqsgpglvkpsqtlsltcaisgdsvlsnsdtwnwirqspsrglewlgrtyhrstwyddyass |
| scFv | | vrgrvsinvdtsknqyslqlnavtpedtgvyycardrlqdgnswsdafdvwgqgtmvtvssggggs |
| AA | | ggggsggggsqsaltqpasasgspgqsvtisctgtssdvggynyvswyqqhpgkapklmiydvsnr |
| | | psgvsnrfsgsksgntasltisglqaedeadyycssytssstlyvfgtgtqltvl |
| CAR22-12 | 269 | gaagtgcagctgcagcagagcggaccgggcctggtcaaaccctcccaaaccctgtccctcacttgc |
| scFv NT | | gcgatctccggggactccgtgctctcgaactccgacacctggaactggattcggcagagcccatcg |
| | | aggggcctggaatggctgggaagaacctaccaccggtccacttggtacgatgactacgcgagctca |
| | | gtgcgcggacgcgtgtcgattaacgtggacacctccaagaaccagtacagcttgcaactgaacgcc |
| | | gtgacccctgaggacaccggagtgtactattgcgcccgggatagacttcaggacggaaacagctgg |
| | | tccgacgcctttgacgtctggggacagggcaccatggtcactgtgtcctcgggtggcggggggtcc |
| | | ggtggaggaggttcaggcggaggcggctcacagtcagcactgacgcagccggcttccgcttccggg |
| | | agccctggacagagcgtgaccatctcgtgtaccgggacttccagcgatgtcggcgggtacaactac |
| | | gtgtcttggtaccaacagcatccgggaaaggcccccaagctcatgatctacgacgtgtcaaaccgg |
| | | cccagcggagtgtccaatcgcttctccggctccaagtcgggcaatactgcctcgctgactatcagc |
| | | ggtctgcaagccgaagatgaggccgactattactgctcctcctacacctcgtcctccacactctac |
| | | gtgttcggaaccggtactcagctgaccgtgctt |
| CAR22-12 | 270 | atggccctccctgtcaccgccctgctgcttccgctggctcttctgctccacgccgctcggcccgaa |
| soluble | | gtgcagctgcagcagagcggaccgggcctggtcaaaccctcccaaaccctgtccctcacttgcgcg |
| scFV NT | | atctccggggactccgtgctctcgaactccgacacctggaactggattcggcagagcccatcgagg |
| | | ggcctggaatggctgggaagaacctaccaccggtccacttggtacgatgactacgcgagctcagtg |
| | | cgcggacgcgtgtcgattaacgtggacacctccaagaaccagtacagcttgcaactgaacgccgtg |
| | | acccctgaggacaccggagtgtactattgcgcccgggatagacttcaggacggaaacagctggtcc |
| | | gacgcctttgacgtctggggacagggcaccatggtcactgtgtcctcgggtggcggggggtccggt |
| | | ggaggaggttcaggcggaggcggctcacagtcagcactgacgcagccggcttccgcttccgggagc |
| | | cctggacagagcgtgaccatctcgtgtaccgggacttccagcgatgtcggcgggtacaactacgtg |
| | | tcttggtaccaacagcatccgggaaaggcccccaagctcatgatctacgacgtgtcaaaccggccc |
| | | agcggagtgtccaatcgcttctccggctccaagtcgggcaatactgcctcgctgactatcagcggt |
| | | ctgcaagccgaagatgaggccgactattactgctcctcctacacctcgtcctccacactctacgtg |
| | | ttcggaaccggtactcagctgaccgtgcttggatcgcaccaccatcaccatcatcatcac |
| CAR22-12 | 271 | malpvtalllplalllhaarpevqlqqsgpglvkpsqtlsltcaisgdsvlsnsdtwnwirqspsr |
| soluble | | glewlgrtyhrstwyddyassvrgrvsinvdtsknqyslqlnavtpedtgvyycardrlqdgnsws |
| scFV AA | | dafdvwgqgtmvtvssggggsggggsggggsqsaltqpasasgspgqsvtisctgtssdvggynyv |
| | | swyqqhpgkapklmiydvsnrpsgvsnrfsgsksgntasltisglqaedeadyycssytssstlyv |
| | | fgtgtqltvlgshhhhhhhh |
| CAR22-12 | 272 | malpvtalllplalllhaarpevqlqqsgpglvkpsqtlsltcaisgdsvlsnsdtwnwirqspsr |
| Full AA | | glewlgrtyhrstwyddyassvrgrvsinvdtsknqyslqlnavtpedtgvyycardrlqdgnsws |
| | | dafdvwgqgtmvtvssggggsggggsggggsqsaltqpasasgspgqsvtisctgtssdvggynyv |
| | | swyqqhpgkapklmiydvsnrpsgvsnrfsgsksgntasltisglqaedeadyycssytssstlyv |
| | | fgtgtqltvltttpaprpptpaptiasqplslrpeacrpaaggavhtrgldfacdiyiwaplagtc |
| | | gvlllslvitlyckrgrkkllyifkqpfmrpvqttqeedgcscrfpeeeeggcelrvkfsrsadap |
| | | aykqgqnqlynelnlgrreeydvldkrrgrdpemggkprrknpqeglynelqkdkmaeayseigmk |
| | | gerrrgkghdglyqglstatkdtydalhmqalppr |
| CAR22-12 | 273 | atggccctccctgtcaccgccctgctgcttccgctggctcttctgctccacgccgctcggcccgaa |
| Full NT | | gtgcagctgcagcagagcggaccgggcctggtcaaaccctcccaaaccctgtccctcacttgcgcg |
| lentivirus | | atctccggggactccgtgctctcgaactccgacacctggaactggattcggcagagcccatcgagg |
| | | ggcctggaatggctgggaagaacctaccaccggtccacttggtacgatgactacgcgagctcagtg |
| | | cgcggacgcgtgtcgattaacgtggacacctccaagaaccagtacagcttgcaactgaacgccgtg |
| | | acccctgaggacaccggagtgtactattgcgcccgggatagacttcaggacggaaacagctggtcc |
| | | gacgcctttgacgtctggggacagggcaccatggtcactgtgtcctcgggtggcggggggtccggt |
| | | ggaggaggttcaggcggaggcggctcacagtcagcactgacgcagccggcttccgcttccgggagc |
| | | cctggacagagcgtgaccatctcgtgtaccgggacttccagcgatgtcggcgggtacaactacgtg |
| | | tcttggtaccaacagcatccgggaaaggcccccaagctcatgatctacgacgtgtcaaaccggccc |
| | | agcggagtgtccaatcgcttctccggctccaagtcgggcaatactgcctcgctgactatcagcggt |
| | | ctgcaagccgaagatgaggccgactattactgctcctcctacacctcgtcctccacactctacgtg |
| | | ttcggaaccggtactcagctgaccgtgcttaccactaccccagcaccgaggccacccaccccggct |
| | | cctaccatcgcctcccagcctctgtccctgcgtccggaggcatgtagacccgcagctggtggggcc |
| | | gtgcatacccggggtcttgacttcgcctgcgatatctacatttgggcccctctggctggtacttgc |
| | | ggggtcctgctgctttcactcgtgatcactctttactgtaagcgcggtcggaagaagctgctgtac |
| | | atctttaagcaacccttcatgaggcctgtgcagactactcaagaggaggacggctgttcatgccgg |
| | | ttcccagaggaggaggaaggcggctgcgaactgcgcgtgaaattcagccgcagcgcagatgctcca |
| | | gcctacaagcaggggcagaaccagctctacaacgaactcaatcttggtcggagagaggagtacgac |
| | | gtgctggacaagcggagaggacgggacccagaaatgggcgggaagccgcgcagaaagaatccccaa |
| | | gagggcctgtacaacgagctccaaaaggataagatggcagaagcctatagcgagattggtatgaaa |
| | | ggggaacgcagaagaggcaaaggccacgacggactgtaccagggactcagcaccgccaccaaggac |
| | | acctatgacgctcttcacatgcaggccctgccgcctcgg |
| CAR22-13 | 274 | qvqlqesgpglvkpsetlsltctvsggsissssyywgwirqppgkglewigsiyysgstyynpslk |
| scFv | | srvtisvdtsknqfslklssvtaadtavyycargrmdtamaqiwgqgtmvtvssgdggsggggsgg |
| AA | | ggsnfmltqphsvsespgktvtipctgssgsfassyvqwyqqrpgsapatviyednqrpsgvpdrf |
| | | sgsvdsssnsasltisglktedeavyycqsydgatwvfgggtkltvl |
| CAR22-13 | 275 | caagtgcagctccaagaatcaggtcccggcctcgtgaagccttccgaaaccctctcccttacttgt |
| scFv NT | | accgtgtccgggggaagcatctcgagcagctcctattactggggatggatcaggcagcctcccgga |
| | | aagggactggagtggattggctccatctactactcggggtccacctactacaacccgtcactgaag |
| | | tcccgcgtgaccatctcggtggatacctccaagaaccagttcagcctgaagctgtcctccgtgact |
| | | gccgccgacactgccgtgtactactgcgcgcggggtcggatggacacagcgatggctcagatttgg |
| | | ggacagggcaccatggtcactgtgtcctccggggatggaggctccgggggcggaggatctggtggc |
| | | ggggggtcgaacttcatgttgacccagccacactccgtgtcggaaagcccaggaaagaccgtcacc |
| | | atcccttgcactggaagcagcggttcgttcgcatcaagctacgtgcagtggtaccagcaaagaccc |
| | | ggcagcgctccggccaccgtcatctatgaggacaatcagcggccgtccggcgtgccggaccgcttc |
| | | agcggatcggtggactcatcctcaaactccgcctccctgacgatttccggtctgaaaaccgaggac |
| | | gaagccgtctactactgccagtcgtacgatggcgccacttgggtgtttggaggaggcaccaagctg |
| | | accgtgctg |
| CAR22-13 | 276 | atggccctccctgtcaccgccctgctgcttccgctggctcttctgctccacgccgctcggccccaa |
| soluble | | gtgcagctccaagaatcaggtcccggcctcgtgaagccttccgaaaccctctcccttacttgtacc |
| scFV NT | | gtgtccgggggaagcatctcgagcagctcctattactggggatggatcaggcagcctcccggaaag |
| | | ggactggagtggattggctccatctactactcggggtccacctactacaacccgtcactgaagtcc |
| | | cgcgtgaccatctcggtggatacctccaagaaccagttcagcctgaagctgtcctccgtgactgcc |
| | | gccgacactgccgtgtactactgcgcgcggggtcggatggacacagcgatggctcagatttgggga |
| | | cagggcaccatggtcactgtgtcctccggggatggaggctccgggggcggaggatctggtggcggg |
| | | gggtcgaacttcatgttgacccagccacactccgtgtcggaaagcccaggaaagaccgtcaccatc |
| | | ccttgcactggaagcagcggttcgttcgcatcaagctacgtgcagtggtaccagcaaagacccggc |
| | | agcgctccggccaccgtcatctatgaggacaatcagcggccgtccggcgtgccggaccgcttcagc |
| | | ggatcggtggactcatcctcaaactccgcctccctgacgatttccggtctgaaaaccgaggacgaa |
| | | gccgtctactactgccagtcgtacgatggcgccacttgggtgtttggaggaggcaccaagctgacc |
| | | gtgctgggatcgcaccaccatcaccatcatcatcac |
| CAR22-13 | 277 | malpvtalllplalllhaarpqvqlqesgpglvkpsetlsltctvsggsissssyywgwirqppgk |
| soluble | | glewigsiyysgstyynpslksrvtisvdtsknqfslklssvtaadtavyycargrmdtamaqiwg |
| scFV AA | | qgtmvtvssgdggsggggsggggsnfmltqphsvsespgktvtipctgssgsfassyvqwyqqrpg |
| | | sapatviyednqrpsgvpdrfsgsvdsssnsasltisglktedeavyycqsydgatwvfgggtklt |
| | | vlgshhhhhhhh |
| CAR22-13 | 278 | malpvtalllplalllhaarpqvqlqesgpglvkpsetlsltctvsggsissssyywgwirqppgk |
| Full AA | | glewigsiyysgstyynpslksrvtisvdtsknqfslklssvtaadtavyycargrmdtamaqiwg |
| | | qgtmvtvssgdggsggggsggggsnfmltqphsvsespgktvtipctgssgsfassyvqwyqqrpg |
| | | sapatviyednqrpsgvpdrfsgsvdsssnsasltisglktedeavyycqsydgatwvfgggtklt |
| | | vltttpaprpptpaptiasqplslrpeacrpaaggavhtrgldfacdiyiwaplagtcgvlllslv |
| | | itlyckrgrkkllyifkqpfmrpvqttqeedgcscrfpeeeeggcelrvkfsrsadapaykqgqnq |
| | | lynelnlgrreeydvldkrrgrdpemggkprrknpqeglynelqkdkmaeayseigmkgerrrgkg |
| | | hdglyqglstatkdtydalhmqalppr |
| CAR22-13 | 279 | atggccctccctgtcaccgccctgctgcttccgctggctcttctgctccacgccgctcggccccaa |
| Full NT | | gtgcagctccaagaatcaggtcccggcctcgtgaagccttccgaaaccctctcccttacttgtacc |
| | | gtgtccgggggaagcatctcgagcagctcctattactggggatggatcaggcagcctcccggaaag |
| | | ggactggagtggattggctccatctactactcggggtccacctactacaacccgtcactgaagtcc |
| | | cgcgtgaccatctcggtggatacctccaagaaccagttcagcctgaagctgtcctccgtgactgcc |
| | | gccgacactgccgtgtactactgcgcgcggggtcggatggacacagcgatggctcagatttgggga |
| | | cagggcaccatggtcactgtgtcctccggggatggaggctccgggggcggaggatctggtggcggg |
| | | gggtcgaacttcatgttgacccagccacactccgtgtcggaaagcccaggaaagaccgtcaccatc |
| | | ccttgcactggaagcagcggttcgttcgcatcaagctacgtgcagtggtaccagcaaagacccggc |
| | | agcgctccggccaccgtcatctatgaggacaatcagcggccgtccggcgtgccggaccgcttcagc |
| | | ggatcggtggactcatcctcaaactccgcctccctgacgatttccggtctgaaaaccgaggacgaa |
| | | gccgtctactactgccagtcgtacgatggcgccacttgggtgtttggaggaggcaccaagctgacc |
| | | gtgctgaccactaccccagcaccgaggccacccaccccggctcctaccatcgcctcccagcctctg |
| | | tccctgcgtccggaggcatgtagacccgcagctggtggggccgtgcatacccggggtcttgacttc |
| | | gcctgcgatatctacatttgggcccctctggctggtacttgcggggtcctgctgctttcactcgtg |
| | | atcactctttactgtaagcgcggtcggaagaagctgctgtacatctttaagcaacccttcatgagg |
| | | cctgtgcagactactcaagaggaggacggctgttcatgccggttcccagaggaggaggaaggcggc |
| | | tgcgaactgcgcgtgaaattcagccgcagcgcagatgctccagcctacaagcaggggcagaaccag |
| | | ctctacaacgaactcaatcttggtcggagagaggagtacgacgtgctggacaagcggagaggacgg |
| | | gacccagaaatgggcgggaagccgcgcagaaagaatccccaagagggcctgtacaacgagctccaa |
| | | aaggataagatggcagaagcctatagcgagattggtatgaaaggggaacgcagaagaggcaaaggc |
| | | cacgacggactgtaccagggactcagcaccgccaccaaggacacctatgacgctcttcacatgcag |
| | | gccctgccgcctcgg |
| CAR22-14 | 280 | qvqlvqsgaevkkpgasvkvsckasgytftsyymhwvrqapgqglewmgiinpsggstsyaqkfqg |
| scFv | | rvtmtrdtststvymelsslrsedtavyycardldvsldiwgqgtmvtvssggggsggggsggggs |
| AA | | qsaltqpasvsgspgqsitiscsgtssdvggynsvswyqqypgkapklmiydvnnrpsgvssrfsg |
| | | sksgntasltisglqaedeadyycssytssstlffgagtkvtvl |
| CAR22-14 | 281 | caagtgcaacttgtccagagcggagcagaagtcaagaaaccaggagcaagcgtgaaggtgtcctgc |
| scFv NT | | aaagcgtcaggctacactttcacctcctactatatgcactgggtccgccaggcccctggacaaggc |
| | | ctggaatggatgggtatcatcaacccgtccggtggaagcaccagctacgcccagaagtttcaggga |
| | | agagtgaccatgactcgggacacttcaacctcgacggtgtacatggagctgtcctccctgcggtcg |
| | | gaggacaccgccgtgtactactgcgcgagggatctcgatgtgtccctggacatttggggacagggc |
| | | accatggtcaccgtgtcctccggggggggcggatcaggcggcggaggttcagggggcgggggctcc |
| | | cagtccgcgctgactcagccggctagcgtgtccggctcgccgggacagagcattaccatctcgtgc |
| | | tcgggtaccagctccgacgtgggaggctataactccgtgtcctggtaccagcagtaccccggaaag |
| | | gcccccaagctgatgatctacgacgtgaacaatcgcccttctggggtgtcctctcggttctccggg |
| | | tcaaagagcggaaacaccgcctccctgaccatctcgggactccaagctgaggatgaagccgactac |
| | | tactgttcgagctacacctcctcctccactctcttcttcggtgccggaactaaggtcacagtgttg |
| CAR22-14 | 282 | atggccctccctgtcaccgccctgctgcttccgctggctcttctgctccacgccgctcggccccaa |
| soluble | | gtgcaacttgtccagagcggagcagaagtcaagaaaccaggagcaagcgtgaaggtgtcctgcaaa |
| scFV NT | | gcgtcaggctacactttcacctcctactatatgcactgggtccgccaggcccctggacaaggcctg |
| | | gaatggatgggtatcatcaacccgtccggtggaagcaccagctacgcccagaagtttcagggaaga |
| | | gtgaccatgactcgggacacttcaacctcgacggtgtacatggagctgtcctccctgcggtcggag |
| | | gacaccgccgtgtactactgcgcgagggatctcgatgtgtccctggacatttggggacagggcacc |
| | | atggtcaccgtgtcctccggggggggcggatcaggcggcggaggttcagggggcgggggctcccag |
| | | tccgcgctgactcagccggctagcgtgtccggctcgccgggacagagcattaccatctcgtgctcg |
| | | ggtaccagctccgacgtgggaggctataactccgtgtcctggtaccagcagtaccccggaaaggcc |
| | | cccaagctgatgatctacgacgtgaacaatcgcccttctggggtgtcctctcggttctccgggtca |
| | | aagagcggaaacaccgcctccctgaccatctcgggactccaagctgaggatgaagccgactactac |
| | | tgttcgagctacacctcctcctccactctcttcttcggtgccggaactaaggtcacagtgttggga |
| | | tcgcaccaccatcaccatcatcatcac |
| CAR22-14 | 283 | malpvtalllplalllhaarpqvqlvqsgaevkkpgasvkvsckasgytftsyymhwvrqapgqgl |
| soluble | | ewmgiinpsggstsyaqkfqgrvtmtrdtststvymelsslrsedtavyycardldvsldiwgqgt |
| scFV AA | | mvtvssggggsggggsggggsqsaltqpasvsgspgqsitiscsgtssdvggynsvswyqqypgka |
| | | pklmiydvnnrpsgvssrfsgsksgntasltisglqaedeadyycssytssstlffgagtkvtvlg |
| | | shhhhhhhh |
| CAR22-14 | 284 | malpvtalllplalllhaarpqvqlvqsgaevkkpgasvkvsckasgytftsyymhwvrqapgqgl |
| Full AA | | ewmgiinpsggstsyaqkfqgrvtmtrdtststvymelsslrsedtavyycardldvsldiwgqgt |
| | | mvtvssggggsggggsggggsqsaltqpasvsgspgqsitiscsgtssdvggynsvswyqqypgka |
| | | pklmiydvnnrpsgvssrfsgsksgntasltisglqaedeadyycssytssstlffgagtkvtvlt |
| | | ttpaprpptpaptiasqplslrpeacrpaaggavhtrgldfacdiyiwaplagtcgvlllslvitl |
| | | yckrgrkkllyifkqpfmrpvqttqeedgcscrfpeeeeggcelrvkfsrsadapaykqgqnqlyn |
| | | elnlgrreeydvldkrrgrdpemggkprrknpqeglynelqkdkmaeayseigmkgerrrgkghdg |
| | | lyqglstatkdtydalhmqalppr |
| CAR22-14 | 285 | atggccctccctgtcaccgccctgctgcttccgctggctcttctgctccacgccgctcggccccaa |
| Full NT | | gtgcaacttgtccagagcggagcagaagtcaagaaaccaggagcaagcgtgaaggtgtcctgcaaa |
| | | gcgtcaggctacactttcacctcctactatatgcactgggtccgccaggcccctggacaaggcctg |
| | | gaatggatgggtatcatcaacccgtccggtggaagcaccagctacgcccagaagtttcagggaaga |
| | | gtgaccatgactcgggacacttcaacctcgacggtgtacatggagctgtcctccctgcggtcggag |
| | | gacaccgccgtgtactactgcgcgagggatctcgatgtgtccctggacatttggggacagggcacc |
| | | atggtcaccgtgtcctccggggggggcggatcaggcggcggaggttcagggggcgggggctcccag |
| | | tccgcgctgactcagccggctagcgtgtccggctcgccgggacagagcattaccatctcgtgctcg |
| | | ggtaccagctccgacgtgggaggctataactccgtgtcctggtaccagcagtaccccggaaaggcc |
| | | cccaagctgatgatctacgacgtgaacaatcgcccttctggggtgtcctctcggttctccgggtca |
| | | aagagcggaaacaccgcctccctgaccatctcgggactccaagctgaggatgaagccgactactac |
| | | tgttcgagctacacctcctcctccactctcttcttcggtgccggaactaaggtcacagtgttgacc |
| | | actaccccagcaccgaggccacccaccccggctcctaccatcgcctcccagcctctgtccctgcgt |
| | | ccggaggcatgtagacccgcagctggtggggccgtgcatacccggggtcttgacttcgcctgcgat |
| | | atctacatttgggcccctctggctggtacttgcggggtcctgctgctttcactcgtgatcactctt |
| | | tactgtaagcgcggtcggaagaagctgctgtacatctttaagcaacccttcatgaggcctgtgcag |
| | | actactcaagaggaggacggctgttcatgccggttcccagaggaggaggaaggcggctgcgaactg |
| | | cgcgtgaaattcagccgcagcgcagatgctccagcctacaagcaggggcagaaccagctctacaac |
| | | gaactcaatcttggtcggagagaggagtacgacgtgctggacaagcggagaggacgggacccagaa |
| | | atgggcgggaagccgcgcagaaagaatccccaagagggcctgtacaacgagctccaaaaggataag |
| | | atggcagaagcctatagcgagattggtatgaaaggggaacgcagaagaggcaaaggccacgacgga |
| | | ctgtaccagggactcagcaccgccaccaaggacacctatgacgctcttcacatgcaggccctgccg |
| | | cctcgg |
| CAR22-15 | 286 | evqlvesggglvqpggslrlscaasgftfssyamhwvrqapgkgleyvsaissnggstyyansvkd |
| scFv | | rftisrdnskntlylqmgslraedmavyycarvhssgyyhpgpndywgqgtlvtvssggggsgggg |
| AA | | sggggssseltqdpavsvalgqtvritcqgdslrtyyatwyqqkpgqapvlvfydennrpsgipdr |
| | | fsgsssgntasltitgtqaedeadyycssrdssgnpscvfgggtkltvl |
| CAR22-15 | 287 | gaagtgcagttggtggagagcggtggaggacttgtgcaacctggaggatcattgagactgtcgtgt |
| scFv NT | | gcggcctccggctttaccttctcgtcctacgctatgcattgggtccgccaggcccccgggaaagga |
| | | ctcgaatacgtcagcgccatctcctcaaacgggggatcaacctactacgccaattccgtgaaggat |
| | | cggttcaccatctcccgggataacagcaagaacaccctgtatctgcaaatggggtccctgagggca |
| | | gaggacatggccgtctactactgcgcgcgcgtgcacagctctggatactaccaccctggaccgaac |
| | | gattactggggccagggcactctcgtgaccgtgtcctcggggggtggtggaagcggcggcggagga |
| | | tcggggggaggcggctcctcgagcgaactgacacaggaccctgccgtgtccgtggctctgggtcag |
| | | actgtgcgcattacgtgtcaaggagactccctgagaacttattacgcgacctggtaccagcagaag |
| | | ccgggacaggcaccggtgctggtgttctacgacgaaaacaaccggccatccgggattcccgaccgg |
| | | ttctccggctcatcgagcggcaacactgcctccctgaccatcaccgggacccaggccgaggacgag |
| | | gccgattactactgctcctcgcgggactcctccggcaacccctcctgcgtgttcggcggtggaacc |
| | | aagctgactgtcctc |
| CAR22-15 | 288 | atggccctccctgtcaccgccctgctgcttccgctggctcttctgctccacgccgctcggcccgaa |
| soluble | | gtgcagttggtggagagcggtggaggacttgtgcaacctggaggatcattgagactgtcgtgtgcg |
| scFV NT | | gcctccggctttaccttctcgtcctacgctatgcattgggtccgccaggcccccgggaaaggactc |
| | | gaatacgtcagcgccatctcctcaaacgggggatcaacctactacgccaattccgtgaaggatcgg |
| | | ttcaccatctcccgggataacagcaagaacaccctgtatctgcaaatggggtccctgagggcagag |
| | | gacatggccgtctactactgcgcgcgcgtgcacagctctggatactaccaccctggaccgaacgat |
| | | tactggggccagggcactctcgtgaccgtgtcctcggggggtggtggaagcggcggcggaggatcg |
| | | gggggaggcggctcctcgagcgaactgacacaggaccctgccgtgtccgtggctctgggtcagact |
| | | gtgcgcattacgtgtcaaggagactccctgagaacttattacgcgacctggtaccagcagaagccg |
| | | ggacaggcaccggtgctggtgttctacgacgaaaacaaccggccatccgggattcccgaccggttc |
| | | tccggctcatcgagcggcaacactgcctccctgaccatcaccgggacccaggccgaggacgaggcc |
| | | gattactactgctcctcgcgggactcctccggcaacccctcctgcgtgttcggcggtggaaccaag |
| | | ctgactgtcctcggatcgcaccaccatcaccatcatcatcac |
| CAR22-15 | 289 | malpvtalllplalllhaarpevqlvesggglvqpggslrlscaasgftfssyamhwvrqapgkgl |
| soluble | | eyvsaissnggstyyansvkdrftisrdnskntlylqmgslraedmavyycarvhssgyyhpgpnd |
| scFV AA | | ywgqgtlvtvssggggsggggsggggssseltqdpavsvalgqtvritcqgdslrtyyatwyqqkp |
| | | gqapvlvfydennrpsgipdrfsgsssgntasltitgtqaedeadyycssrdssgnpscvfgggtk |
| | | ltvlgshhhhhhhh |
| CAR22-15 | 290 | malpvtalllplalllhaarpevqlvesggglvqpggslrlscaasgftfssyamhwvrqapgkgl |
| Full AA | | eyvsaissnggstyyansvkdrftisrdnskntlylqmgslraedmavyycarvhssgyyhpgpnd |
| | | ywgqgtlvtvssggggsggggsggggssseltqdpavsvalgqtvritcqgdslrtyyatwyqqkp |
| | | gqapvlvfydennrpsgipdrfsgsssgntasltitgtqaedeadyycssrdssgnpscvfgggtk |
| | | ltvltttpaprpptpaptiasqplslrpeacrpaaggavhtrgldfacdiyiwaplagtcgvllls |
| | | lvitlyckrgrkkllyifkqpfmrpvqttqeedgcscrfpeeeeggcelrvkfsrsadapaykqgq |
| | | nqlynelnlgrreeydvldkrrgrdpemggkprrknpqeglynelqkdkmaeayseigmkgerrrg |
| | | kghdglyqglstatkdtydalhmqalppr |
| CAR22-15 | 291 | atggccctccctgtcaccgccctgctgcttccgctggctcttctgctccacgccgctcggcccgaa |
| Full NT | | gtgcagttggtggagagcggtggaggacttgtgcaacctggaggatcattgagactgtcgtgtgcg |
| | | gcctccggctttaccttctcgtcctacgctatgcattgggtccgccaggcccccgggaaaggactc |
| | | gaatacgtcagcgccatctcctcaaacgggggatcaacctactacgccaattccgtgaaggatcgg |
| | | ttcaccatctcccgggataacagcaagaacaccctgtatctgcaaatggggtccctgagggcagag |
| | | gacatggccgtctactactgcgcgcgcgtgcacagctctggatactaccaccctggaccgaacgat |
| | | tactggggccagggcactctcgtgaccgtgtcctcggggggtggtggaagcggcggcggaggatcg |
| | | gggggaggcggctcctcgagcgaactgacacaggaccctgccgtgtccgtggctctgggtcagact |
| | | gtgcgcattacgtgtcaaggagactccctgagaacttattacgcgacctggtaccagcagaagccg |
| | | ggacaggcaccggtgctggtgttctacgacgaaaacaaccggccatccgggattcccgaccggttc |
| | | tccggctcatcgagcggcaacactgcctccctgaccatcaccgggacccaggccgaggacgaggcc |
| | | gattactactgctcctcgcgggactcctccggcaacccctcctgcgtgttcggcggtggaaccaag |
| | | ctgactgtcctcaccactaccccagcaccgaggccacccaccccggctcctaccatcgcctcccag |
| | | cctctgtccctgcgtccggaggcatgtagacccgcagctggtggggccgtgcatacccggggtctt |
| | | gacttcgcctgcgatatctacatttgggcccctctggctggtacttgcggggtcctgctgctttca |
| | | ctcgtgatcactctttactgtaagcgcggtcggaagaagctgctgtacatctttaagcaacccttc |
| | | atgaggcctgtgcagactactcaagaggaggacggctgttcatgccggttcccagaggaggaggaa |
| | | ggcggctgcgaactgcgcgtgaaattcagccgcagcgcagatgctccagcctacaagcaggggcag |
| | | aaccagctctacaacgaactcaatcttggtcggagagaggagtacgacgtgctggacaagcggaga |
| | | ggacgggacccagaaatgggcgggaagccgcgcagaaagaatccccaagagggcctgtacaacgag |
| | | ctccaaaaggataagatggcagaagcctatagcgagattggtatgaaaggggaacgcagaagaggc |
| | | aaaggccacgacggactgtaccagggactcagcaccgccaccaaggacacctatgacgctcttcac |
| | | atgcaggccctgccgcctcgg |
| CAR22-16 | 292 | evqlvesgaevkkpgasvkvsckasgytftsyymhwvrqapgqglewmgiinpsggstsyaqkfqg |
| scFv | | rvtmtrdtststaymelsslrsedtavyycareagvvavdywgqgtlvtvssggggsggggsgggg |
| AA | | sqsaltqpasvsgspgqsitisctgtssdvggynyvswyqqhpgkapklmiydvsnrpsgvsnrfs |
| | | gsksgntasltisglqaedeadyycssytssstwvfgggtkltvl |
| CAR22-16 | 293 | gaagtgcaactcgtcgaatctggagcggaagtcaagaagcctggagcaagcgtgaaagtgtcctgt |
| scFv NT | | aaagcgtccggttacaccttcacttcgtattacatgcactgggtccgccaagctccgggacaggga |
| | | ctggaatggatgggcatcatcaaccctagcggaggatcgacctcctacgcccaaaagttccagggc |
| | | agagtgaccatgacccgggacaccagcacatcaactgcctacatggagctgtcatcactgaggtcc |
| | | gaggataccgccgtgtactattgcgcccgcgaggccggcgtggtggccgtcgactactggggacag |
| | | ggcactctcgtgaccgtgtcatcgggaggcggcggttccggggggggagggtcggggggcggaggc |
| | | tcccagtccgcactgacgcagccggcttccgtgtctggttcgcccggacagtccatcaccatttcc |
| | | tgcactggaaccagcagcgacgtgggcggttacaactacgtgtcatggtaccagcagcatcccgga |
| | | aaggccccaaagcttatgatctacgacgtgtccaatcggccgtcgggcgtcagcaaccggttctcc |
| | | ggctccaagtccgggaacactgccagcctgaccattagcgggctgcaggccgaggacgaagcggat |
| | | tactactgctcctcctacacttcctcctcgacctgggtgtttggtggaggcaccaagttgactgtg |
| | | ctg |
| CAR22-16 | 294 | atggccctccctgtcaccgccctgctgcttccgctggctcttctgctccacgccgctcggcccgaa |
| soluble | | gtgcaactcgtcgaatctggagcggaagtcaagaagcctggagcaagcgtgaaagtgtcctgtaaa |
| scFV NT | | gcgtccggttacaccttcacttcgtattacatgcactgggtccgccaagctccgggacagggactg |
| | | gaatggatgggcatcatcaaccctagcggaggatcgacctcctacgcccaaaagttccagggcaga |
| | | gtgaccatgacccgggacaccagcacatcaactgcctacatggagctgtcatcactgaggtccgag |
| | | gataccgccgtgtactattgcgcccgcgaggccggcgtggtggccgtcgactactggggacagggc |
| | | actctcgtgaccgtgtcatcgggaggcggcggttccggggggggagggtcggggggcggaggctcc |
| | | cagtccgcactgacgcagccggcttccgtgtctggttcgcccggacagtccatcaccatttcctgc |
| | | actggaaccagcagcgacgtgggcggttacaactacgtgtcatggtaccagcagcatcccggaaag |
| | | gccccaaagcttatgatctacgacgtgtccaatcggccgtcgggcgtcagcaaccggttctccggc |
| | | tccaagtccgggaacactgccagcctgaccattagcgggctgcaggccgaggacgaagcggattac |
| | | tactgctcctcctacacttcctcctcgacctgggtgtttggtggaggcaccaagttgactgtgctg |
| | | ggatcgcaccaccatcaccatcatcatcac |
| CAR22-16 | 295 | malpvtalllplalllhaarpevqlvesgaevkkpgasvkvsckasgytftsyymhwvrqapgqgl |
| soluble | | ewmgiinpsggstsyaqkfqgrvtmtrdtststaymelsslrsedtavyycareagvvavdywgqg |
| scFV AA | | tlvtvssggggsggggsggggsqsaltqpasvsgspgqsitisctgtssdvggynyvswyqqhpgk |
| | | apklmiydvsnrpsgvsnrfsgsksgntasltisglqaedeadyycssytssstwvfgggtkltvl |
| | | gshhhhhhhh |
| CAR22-16 | 296 | malpvtalllplalllhaarpevqlvesgaevkkpgasvkvsckasgytftsyymhwvrqapgqgl |
| Full AA | | ewmgiinpsggstsyaqkfqgrvtmtrdtststaymelsslrsedtavyycareagvvavdywgqg |
| | | tlvtvssggggsggggsggggsqsaltqpasvsgspgqsitisctgtssdvggynyvswyqqhpgk |
| | | apklmiydvsnrpsgvsnrfsgsksgntasltisglqaedeadyycssytssstwvfgggtkltvl |
| | | tttpaprpptpaptiasqplslrpeacrpaaggavhtrgldfacdiyiwaplagtcgvlllslvit |
| | | lyckrgrkkllyifkqpfmrpvqttqeedgcscrfpeeeeggcelrvkfsrsadapaykqgqnqly |
| | | nelnlgrreeydvldkrrgrdpemggkprrknpqeglynelqkdkmaeayseigmkgerrrgkghd |
| | | glyqglstatkdtydalhmqalppr |
| CAR22-16 | 297 | atggccctccctgtcaccgccctgctgcttccgctggctcttctgctccacgccgctcggcccgaa |
| Full NT | | gtgcaactcgtcgaatctggagcggaagtcaagaagcctggagcaagcgtgaaagtgtcctgtaaa |
| | | gcgtccggttacaccttcacttcgtattacatgcactgggtccgccaagctccgggacagggactg |
| | | gaatggatgggcatcatcaaccctagcggaggatcgacctcctacgcccaaaagttccagggcaga |
| | | gtgaccatgacccgggacaccagcacatcaactgcctacatggagctgtcatcactgaggtccgag |
| | | gataccgccgtgtactattgcgcccgcgaggccggcgtggtggccgtcgactactggggacagggc |
| | | actctcgtgaccgtgtcatcgggaggcggcggttccggggggggagggtcggggggcggaggctcc |
| | | cagtccgcactgacgcagccggcttccgtgtctggttcgcccggacagtccatcaccatttcctgc |
| | | actggaaccagcagcgacgtgggcggttacaactacgtgtcatggtaccagcagcatcccggaaag |
| | | gccccaaagcttatgatctacgacgtgtccaatcggccgtcgggcgtcagcaaccggttctccggc |
| | | tccaagtccgggaacactgccagcctgaccattagcgggctgcaggccgaggacgaagcggattac |
| | | tactgctcctcctacacttcctcctcgacctgggtgtttggtggaggcaccaagttgactgtgctg |
| | | accactaccccagcaccgaggccacccaccccggctcctaccatcgcctcccagcctctgtccctg |
| | | cgtccggaggcatgtagacccgcagctggtggggccgtgcatacccggggtcttgacttcgcctgc |
| | | gatatctacatttgggcccctctggctggtacttgcggggtcctgctgctttcactcgtgatcact |
| | | ctttactgtaagcgcggtcggaagaagctgctgtacatctttaagcaacccttcatgaggcctgtg |
| | | cagactactcaagaggaggacggctgttcatgccggttcccagaggaggaggaaggcggctgcgaa |
| | | ctgcgcgtgaaattcagccgcagcgcagatgctccagcctacaagcaggggcagaaccagctctac |
| | | aacgaactcaatcttggtcggagagaggagtacgacgtgctggacaagcggagaggacgggaccca |
| | | gaaatgggcgggaagccgcgcagaaagaatccccaagagggcctgtacaacgagctccaaaaggat |
| | | aagatggcagaagcctatagcgagattggtatgaaaggggaacgcagaagaggcaaaggccacgac |
| | | ggactgtaccagggactcagcaccgccaccaaggacacctatgacgctcttcacatgcaggccctg |
| | | ccgcctcgg |
| CAR22-17 | 298 | qvqlvqsgggvvqpgrslrlscaasgftfssyamswvrqapgkglewvsaisgsggstyyadsvkg |
| scFv | | rftisrdnskntlylqmnslraedtavyycakeplfgvveedvdywgqgtlvtvssggggsggggs |
| AA | | ggggsdvvmtqsplslpvtpgepasiscrssqsllagnghnyldwylqkpgqspqlliylgsnras |
| | | gvpdrfsgsgsgtdftlkisrveaedvgvyycmqalqnpltfgggtkleikr |
| CAR22-17 | 299 | caagtgcagttggtccagagcggaggaggagtggtgcaacccggaagatcattgaggctctcatgt |
| scFv NT | | gctgcaagcggattcaccttctcgagctacgcaatgtcctgggtgcgccaggcccctggaaaggga |
| | | ctggaatgggtgtccgccatctcgggctccggcggatcaacgtactacgccgactccgtgaagggc |
| | | cgctttactatttcaagagacaactccaagaacactctgtacctccaaatgaactctctgcgggcc |
| | | gaggacaccgccgtgtactactgcgcgaaggagccgctgttcggcgtggtggaggaagatgtggac |
| | | tactggggccagggcactctcgtcaccgtgtcctccggcggtggaggatcgggaggcggaggcagc |
| | | gggggtggtggctccgacgtcgtgatgacccagtcgcccctgtccctgcccgtgacccctggggaa |
| | | ccggcctccatttcctgccggtccagccagtcgctgctggctggaaacggacacaattaccttgat |
| | | tggtatctgcaaaagcctgggcagtcaccgcagctgctgatctacctcggaagcaaccgggcgtcc |
| | | ggggtgccggaccggttctccggttccgggagcggcaccgacttcaccctgaaaatctcgagggtg |
| | | gaggccgaagatgtcggagtgtactattgcatgcaggcgcttcagaacccactcactttcgggggc |
| | | ggtactaagctggaaatcaagcgc |
| CAR22-17 | 300 | atggccctccctgtcaccgccctgctgcttccgctggctcttctgctccacgccgctcggccccaa |
| soluble | | gtgcagttggtccagagcggaggaggagtggtgcaacccggaagatcattgaggctctcatgtgct |
| scFV NT | | gcaagcggattcaccttctcgagctacgcaatgtcctgggtgcgccaggcccctggaaagggactg |
| | | gaatgggtgtccgccatctcgggctccggcggatcaacgtactacgccgactccgtgaagggccgc |
| | | tttactatttcaagagacaactccaagaacactctgtacctccaaatgaactctctgcgggccgag |
| | | gacaccgccgtgtactactgcgcgaaggagccgctgttcggcgtggtggaggaagatgtggactac |
| | | tggggccagggcactctcgtcaccgtgtcctccggcggtggaggatcgggaggcggaggcagcggg |
| | | ggtggtggctccgacgtcgtgatgacccagtcgcccctgtccctgcccgtgacccctggggaaccg |
| | | gcctccatttcctgccggtccagccagtcgctgctggctggaaacggacacaattaccttgattgg |
| | | tatctgcaaaagcctgggcagtcaccgcagctgctgatctacctcggaagcaaccgggcgtccggg |
| | | gtgccggaccggttctccggttccgggagcggcaccgacttcaccctgaaaatctcgagggtggag |
| | | gccgaagatgtcggagtgtactattgcatgcaggcgcttcagaacccactcactttcgggggcggt |
| | | actaagctggaaatcaagcgcggatcgcaccaccatcaccatcatcatcac |
| CAR22-17 | 301 | malpvtalllplalllhaarpqvqlvqsgggvvqpgrslrlscaasgftfssyamswvrqapgkgl |
| soluble | | ewvsaisgsggstyyadsvkgrftisrdnskntlylqmnslraedtavyycakeplfgvveedvdy |
| scFV AA | | wgqgtlvtvssggggsggggsggggsdvvmtqsplslpvtpgepasiscrssqsllagnghnyldw |
| | | ylqkpgqspqlliylgsnrasgvpdrfsgsgsgtdftlkisrveaedvgvyycmqalqnpltfggg |
| | | tkleikrgshhhhhhhh |
| CAR22-17 | 302 | malpvtalllplalllhaarpqvqlvqsgggvvqpgrslrlscaasgftfssyamswvrqapgkgl |
| Full AA | | ewvsaisgsggstyyadsvkgrftisrdnskntlylqmnslraedtavyycakeplfgvveedvdy |
| | | wgqgtlvtvssggggsggggsggggsdvvmtqsplslpvtpgepasiscrssqsllagnghnyldw |
| | | ylqkpgqspqlliylgsnrasgvpdrfsgsgsgtdftlkisrveaedvgvyycmqalqnpltfggg |
| | | tkleikrtttpaprpptpaptiasqplslrpeacrpaaggavhtrgldfacdiyiwaplagtcgvl |
| | | llslvitlyckrgrkkllyifkqpfmrpvqttqeedgcscrfpeeeeggcelrvkfsrsadapayk |
| | | qgqnqlynelnlgrreeydvldkrrgrdpemggkprrknpqeglynelqkdkmaeayseigmkger |
| | | rrgkghdglyqglstatkdtydalhmqalppr |
| CAR22-17 | 303 | atggccctccctgtcaccgccctgctgcttccgctggctcttctgctccacgccgctcggccccaa |
| Full NT | | gtgcagttggtccagagcggaggaggagtggtgcaacccggaagatcattgaggctctcatgtgct |
| | | gcaagcggattcaccttctcgagctacgcaatgtcctgggtgcgccaggcccctggaaagggactg |
| | | gaatgggtgtccgccatctcgggctccggcggatcaacgtactacgccgactccgtgaagggccgc |
| | | tttactatttcaagagacaactccaagaacactctgtacctccaaatgaactctctgcgggccgag |
| | | gacaccgccgtgtactactgcgcgaaggagccgctgttcggcgtggtggaggaagatgtggactac |
| | | tggggccagggcactctcgtcaccgtgtcctccggcggtggaggatcgggaggcggaggcagcggg |
| | | ggtggtggctccgacgtcgtgatgacccagtcgcccctgtccctgcccgtgacccctggggaaccg |
| | | gcctccatttcctgccggtccagccagtcgctgctggctggaaacggacacaattaccttgattgg |
| | | tatctgcaaaagcctgggcagtcaccgcagctgctgatctacctcggaagcaaccgggcgtccggg |
| | | gtgccggaccggttctccggttccgggagcggcaccgacttcaccctgaaaatctcgagggtggag |
| | | gccgaagatgtcggagtgtactattgcatgcaggcgcttcagaacccactcactttcgggggcggt |
| | | actaagctggaaatcaagcgcaccactaccccagcaccgaggccacccaccccggctcctaccatc |
| | | gcctcccagcctctgtccctgcgtccggaggcatgtagacccgcagctggtggggccgtgcatacc |
| | | cggggtcttgacttcgcctgcgatatctacatttgggcccctctggctggtacttgcggggtcctg |
| | | ctgctttcactcgtgatcactctttactgtaagcgcggtcggaagaagctgctgtacatctttaag |
| | | caacccttcatgaggcctgtgcagactactcaagaggaggacggctgttcatgccggttcccagag |
| | | gaggaggaaggcggctgcgaactgcgcgtgaaattcagccgcagcgcagatgctccagcctacaag |
| | | caggggcagaaccagctctacaacgaactcaatcttggtcggagagaggagtacgacgtgctggac |
| | | aagcggagaggacgggacccagaaatgggcgggaagccgcgcagaaagaatccccaagagggcctg |
| | | tacaacgagctccaaaaggataagatggcagaagcctatagcgagattggtatgaaaggggaacgc |
| | | agaagaggcaaaggccacgacggactgtaccagggactcagcaccgccaccaaggacacctatgac |
| | | gctcttcacatgcaggccctgccgcctcgg |
| CAR22-18 | 304 | qvqlvqsgaevkkpgasvkvsckasgytftsyymhwvrqapgqglewmgiinpsggstsyaqkfqg |
| scFv | | rvtmtrdtststvymelsslrsedtavyycargsgslgdafdiwgqgtmvtvssggggsggggsgg |
| AA | | ggsqsaltqpasvsgspgqsitisctgsssdvggynyvswyqqhpgkapklmiyevsnrpsgvsnr |
| | | fsgsksgntasltisglqaedeadyycssytssstlvfgtgtkvtvl |
| CAR22-18 | 305 | caagtccaactcgtccaaagcggagctgaagtcaagaagcctggagcgtcagtgaaagtgtcctgc |
| scFv NT | | aaggcctccggctacacgtttacttcctactacatgcattgggtgcggcaggccccaggtcaagga |
| | | ctggaatggatgggcatcattaacccttccggggggtccacctcgtatgcgcagaagttccagggc |
| | | agagtgaccatgacccgcgacacctccacctccactgtgtacatggaactgtccagcctgaggtct |
| | | gaggacactgccgtgtactactgtgcgcgcggtagcggatcactgggcgatgccttcgacatctgg |
| | | ggccagggaactatggtcaccgtgtcctccgggggagggggctcgggtggaggaggttcaggcgga |
| | | ggaggctcccagagcgcattgacacagcccgcttcggtgtccggctccccgggacagtccattacc |
| | | atctcgtgcaccggaagctcaagcgatgtcggagggtacaactacgtgtcgtggtatcagcagcac |
| | | ccgggaaaggcccccaagctcatgatctacgaagtgtccaatcggccgtccggggtgtcgaaccgg |
| | | ttcagcggttccaagtcgggcaacactgccagcctgaccatcagcgggctgcaggccgaggacgag |
| | | gccgactactactgctcctcgtacacctcctcctcaaccctggtgttcggcactggaactaaggtc |
| | | accgtgctt |
| CAR22-18 | 306 | atggccctccctgtcaccgccctgctgcttccgctggctcttctgctccacgccgctcggccccaa |
| soluble | | gtccaactcgtccaaagcggagctgaagtcaagaagcctggagcgtcagtgaaagtgtcctgcaag |
| scFV NT | | gcctccggctacacgtttacttcctactacatgcattgggtgcggcaggccccaggtcaaggactg |
| | | gaatggatgggcatcattaacccttccggggggtccacctcgtatgcgcagaagttccagggcaga |
| | | gtgaccatgacccgcgacacctccacctccactgtgtacatggaactgtccagcctgaggtctgag |
| | | gacactgccgtgtactactgtgcgcgcggtagcggatcactgggcgatgccttcgacatctggggc |
| | | cagggaactatggtcaccgtgtcctccgggggagggggctcgggtggaggaggttcaggcggagga |
| | | ggctcccagagcgcattgacacagcccgcttcggtgtccggctccccgggacagtccattaccatc |
| | | tcgtgcaccggaagctcaagcgatgtcggagggtacaactacgtgtcgtggtatcagcagcacccg |
| | | ggaaaggcccccaagctcatgatctacgaagtgtccaatcggccgtccggggtgtcgaaccggttc |
| | | agcggttccaagtcgggcaacactgccagcctgaccatcagcgggctgcaggccgaggacgaggcc |
| | | gactactactgctcctcgtacacctcctcctcaaccctggtgttcggcactggaactaaggtcacc |
| | | gtgcttggatcgcaccaccatcaccatcatcatcac |
| CAR22-18 | 307 | malpvtalllplalllhaarpqvqlvqsgaevkkpgasvkvsckasgytftsyymhwvrqapgqgl |
| soluble | | ewmgiinpsggstsyaqkfqgrvtmtrdtststvymelsslrsedtavyycargsgslgdafdiwg |
| scFV AA | | qgtmvtvssggggsggggsggggsqsaltqpasvsgspgqsitisctgsssdvggynyvswyqqhp |
| | | gkapklmiyevsnrpsgvsnrfsgsksgntasltisglqaedeadyycssytssstlvfgtgtkvt |
| | | vlgshhhhhhhh |
| CAR22-18 | 308 | malpvtalllplalllhaarpqvqlvqsgaevkkpgasvkvsckasgytftsyymhwvrqapgqgl |
| Full AA | | ewmgiinpsggstsyaqkfqgrvtmtrdtststvymelsslrsedtavyycargsgslgdafdiwg |
| | | qgtmvtvssggggsggggsggggsqsaltqpasvsgspgqsitisctgsssdvggynyvswyqqhp |
| | | gkapklmiyevsnrpsgvsnrfsgsksgntasltisglqaedeadyycssytssstlvfgtgtkvt |
| | | vltttpaprpptpaptiasqplslrpeacrpaaggavhtrgldfacdiyiwaplagtcgvlllslv |
| | | itlyckrgrkkllyifkqpfmrpvqttqeedgcscrfpeeeeggcelrvkfsrsadapaykqgqnq |
| | | lynelnlgrreeydvldkrrgrdpemggkprrknpqeglynelqkdkmaeayseigmkgerrrgkg |
| | | hdglyqglstatkdtydalhmqalppr |
| CAR22-18 | 309 | atggccctccctgtcaccgccctgctgcttccgctggctcttctgctccacgccgctcggccccaa |
| Full NT | | gtccaactcgtccaaagcggagctgaagtcaagaagcctggagcgtcagtgaaagtgtcctgcaag |
| | | gcctccggctacacgtttacttcctactacatgcattgggtgcggcaggccccaggtcaaggactg |
| | | gaatggatgggcatcattaacccttccggggggtccacctcgtatgcgcagaagttccagggcaga |
| | | gtgaccatgacccgcgacacctccacctccactgtgtacatggaactgtccagcctgaggtctgag |
| | | gacactgccgtgtactactgtgcgcgcggtagcggatcactgggcgatgccttcgacatctggggc |
| | | cagggaactatggtcaccgtgtcctccgggggagggggctcgggtggaggaggttcaggcggagga |
| | | ggctcccagagcgcattgacacagcccgcttcggtgtccggctccccgggacagtccattaccatc |
| | | tcgtgcaccggaagctcaagcgatgtcggagggtacaactacgtgtcgtggtatcagcagcacccg |
| | | ggaaaggcccccaagctcatgatctacgaagtgtccaatcggccgtccggggtgtcgaaccggttc |
| | | agcggttccaagtcgggcaacactgccagcctgaccatcagcgggctgcaggccgaggacgaggcc |
| | | gactactactgctcctcgtacacctcctcctcaaccctggtgttcggcactggaactaaggtcacc |
| | | gtgcttaccactaccccagcaccgaggccacccaccccggctcctaccatcgcctcccagcctctg |
| | | tccctgcgtccggaggcatgtagacccgcagctggtggggccgtgcatacccggggtcttgacttc |
| | | gcctgcgatatctacatttgggcccctctggctggtacttgcggggtcctgctgctttcactcgtg |
| | | atcactctttactgtaagcgcggtcggaagaagctgctgtacatctttaagcaacccttcatgagg |
| | | cctgtgcagactactcaagaggaggacggctgttcatgccggttcccagaggaggaggaaggcggc |
| | | tgcgaactgcgcgtgaaattcagccgcagcgcagatgctccagcctacaagcaggggcagaaccag |
| | | ctctacaacgaactcaatcttggtcggagagaggagtacgacgtgctggacaagcggagaggacgg |
| | | gacccagaaatgggcgggaagccgcgcagaaagaatccccaagagggcctgtacaacgagctccaa |
| | | aaggataagatggcagaagcctatagcgagattggtatgaaaggggaacgcagaagaggcaaaggc |
| | | cacgacggactgtaccagggactcagcaccgccaccaaggacacctatgacgctcttcacatgcag |
| | | gccctgccgcctcgg |
| CAR22-19 | 310 | qvqlvqsgaevkkpgasvkvsckasgytftsyymhwvrqapgqglewmgiinpsggstsyaqkfqg |
| scFv | | rvtmtrdtststvymelsslrsedtavyycardgfgelsgafdiwgqgtmvtvssggggsggggsg |
| AA | | gggsqsaltqpasvsgspgqsitisctgtssdvggynyvswyqqhpgkapklmiydvsnrpsgvsn |
| | | rfsgsksgntasltisglqaedeadyycssyassstlvfgggtkvtvl |
| CAR22-19 | 311 | caagtgcaactcgtccagtccggtgcagaagtcaagaaacccggagcctccgtgaaagtgtcctgc |
| scFv NT | | aaggcctccggctacacgttcacttcatactacatgcactgggtccgccaggcgcccggacaggga |
| | | ctggagtggatgggcatcatcaacccttccggcggctcgacctcctacgcccaaaagttccaggga |
| | | agagtgacaatgaccagggatacttcaaccagcactgtctacatggaactgtctagcttgcggtcc |
| | | gaggacactgccgtgtactattgcgctcgggacggtttcggggagctgtccggggcctttgacatc |
| | | tggggccaggggactatggtgaccgtgtcctcgggcggaggcggcagcggaggaggaggttcggga |
| | | ggcggaggaagccagtcagcactgacccagccagcctcggtgtccgggagcccgggccagagcatc |
| | | actatttcctgtaccgggacctcctccgacgtgggagggtacaattacgtgtcatggtatcaacag |
| | | catccgggaaaggcgccgaagctgatgatctacgacgtgtcgaaccgccctagcggagtgtccaac |
| | | cggttctccggttcgaagtccgggaacaccgcgagcctgaccattagcggactccaggccgaggat |
| | | gaagccgactactactgctcctcctacgcttcatcgtccaccctggtgttcggtggtggcaccaag |
| | | gtcaccgtgctt |
| CAR22-19 | 312 | atggccctccctgtcaccgccctgctgcttccgctggctcttctgctccacgccgctcggccccaa |
| soluble | | gtgcaactcgtccagtccggtgcagaagtcaagaaacccggagcctccgtgaaagtgtcctgcaag |
| scFV NT | | gcctccggctacacgttcacttcatactacatgcactgggtccgccaggcgcccggacagggactg |
| | | gagtggatgggcatcatcaacccttccggcggctcgacctcctacgcccaaaagttccagggaaga |
| | | gtgacaatgaccagggatacttcaaccagcactgtctacatggaactgtctagcttgcggtccgag |
| | | gacactgccgtgtactattgcgctcgggacggtttcggggagctgtccggggcctttgacatctgg |
| | | ggccaggggactatggtgaccgtgtcctcgggcggaggcggcagcggaggaggaggttcgggaggc |
| | | ggaggaagccagtcagcactgacccagccagcctcggtgtccgggagcccgggccagagcatcact |
| | | atttcctgtaccgggacctcctccgacgtgggagggtacaattacgtgtcatggtatcaacagcat |
| | | ccgggaaaggcgccgaagctgatgatctacgacgtgtcgaaccgccctagcggagtgtccaaccgg |
| | | ttctccggttcgaagtccgggaacaccgcgagcctgaccattagcggactccaggccgaggatgaa |
| | | gccgactactactgctcctcctacgcttcatcgtccaccctggtgttcggtggtggcaccaaggtc |
| | | accgtgcttggatcgcaccaccatcaccatcatcatcac |
| CAR22-19 | 313 | malpvtalllplalllhaarpqvqlvqsgaevkkpgasvkvsckasgytftsyymhwvrqapgqgl |
| soluble | | ewmgiinpsggstsyaqkfqgrvtmtrdtststvymelsslrsedtavyycardgfgelsgafdiw |
| scFV AA | | gqgtmvtvssggggsggggsggggsqsaltqpasvsgspgqsitisctgtssdvggynyvswyqqh |
| | | pgkapklmiydvsnrpsgvsnrfsgsksgntasltisglqaedeadyycssyassstlvfgggtkv |
| | | tvlgshhhhhhhh |
| CAR22-19 | 314 | malpvtalllplalllhaarpqvqlvqsgaevkkpgasvkvsckasgytftsyymhwvrqapgqgl |
| Full AA | | ewmgiinpsggstsyaqkfqgrvtmtrdtststvymelsslrsedtavyycardgfgelsgafdiw |
| | | gqgtmvtvssggggsggggsggggsqsaltqpasvsgspgqsitisctgtssdvggynyvswyqqh |
| | | pgkapklmiydvsnrpsgvsnrfsgsksgntasltisglqaedeadyycssyassstlvfgggtkv |
| | | tvltttpaprpptpaptiasqplslrpeacrpaaggavhtrgldfacdiyiwaplagtcgvlllsl |
| | | vitlyckrgrkkllyifkqpfmrpvqttqeedgcscrfpeeeeggcelrvkfsrsadapaykqgqn |
| | | qlynelnlgrreeydvldkrrgrdpemggkprrknpqeglynelqkdkmaeayseigmkgerrrgk |
| | | ghdglyqglstatkdtydalhmqalppr |
| CAR22-19 | 315 | atggccctccctgtcaccgccctgctgcttccgctggctcttctgctccacgccgctcggccccaa |
| Full NT | | gtgcaactcgtccagtccggtgcagaagtcaagaaacccggagcctccgtgaaagtgtcctgcaag |
| | | gcctccggctacacgttcacttcatactacatgcactgggtccgccaggcgcccggacagggactg |
| | | gagtggatgggcatcatcaacccttccggcggctcgacctcctacgcccaaaagttccagggaaga |
| | | gtgacaatgaccagggatacttcaaccagcactgtctacatggaactgtctagcttgcggtccgag |
| | | gacactgccgtgtactattgcgctcgggacggtttcggggagctgtccggggcctttgacatctgg |
| | | ggccaggggactatggtgaccgtgtcctcgggcggaggcggcagcggaggaggaggttcgggaggc |
| | | ggaggaagccagtcagcactgacccagccagcctcggtgtccgggagcccgggccagagcatcact |
| | | atttcctgtaccgggacctcctccgacgtgggagggtacaattacgtgtcatggtatcaacagcat |
| | | ccgggaaaggcgccgaagctgatgatctacgacgtgtcgaaccgccctagcggagtgtccaaccgg |
| | | ttctccggttcgaagtccgggaacaccgcgagcctgaccattagcggactccaggccgaggatgaa |
| | | gccgactactactgctcctcctacgcttcatcgtccaccctggtgttcggtggtggcaccaaggtc |
| | | accgtgcttaccactaccccagcaccgaggccacccaccccggctcctaccatcgcctcccagcct |
| | | ctgtccctgcgtccggaggcatgtagacccgcagctggtggggccgtgcatacccggggtcttgac |
| | | ttcgcctgcgatatctacatttgggcccctctggctggtacttgcggggtcctgctgctttcactc |
| | | gtgatcactctttactgtaagcgcggtcggaagaagctgctgtacatctttaagcaacccttcatg |
| | | aggcctgtgcagactactcaagaggaggacggctgttcatgccggttcccagaggaggaggaaggc |
| | | ggctgcgaactgcgcgtgaaattcagccgcagcgcagatgctccagcctacaagcaggggcagaac |
| | | cagctctacaacgaactcaatcttggtcggagagaggagtacgacgtgctggacaagcggagagga |
| | | cgggacccagaaatgggcgggaagccgcgcagaaagaatccccaagagggcctgtacaacgagctc |
| | | caaaaggataagatggcagaagcctatagcgagattggtatgaaaggggaacgcagaagaggcaaa |
| | | ggccacgacggactgtaccagggactcagcaccgccaccaaggacacctatgacgctcttcacatg |
| | | caggccctgccgcctcgg |
| CAR22-20 | 316 | evqlvesgaevkkpgasvkvsckasgytftsyymhwvrqapgqglewmgiinpsggstsyaqkfqg |
| scFv | | rvtmtrdtststvymelsslrsedtavyycargpigcsggscldywgqgtlvtvssggggsggggs |
| AA | | ggggsqsaltqpayvsgspgqsitisctgtnsdvgrynyvswyqqhpgkapklmiyevsyrpsgvs |
| | | nrfsgsksgntasltisglqaedeadyycssyttsstldfgtgtkvtvl |
| CAR22-20 | 317 | gaagtgcaactcgtcgaatcaggagcagaagtcaagaaaccaggagcctccgtgaaagtcagctgc |
| scFv NT | | aaggcctcgggctacactttcacttcctactacatgcattgggtgcgccaggccccgggccaggga |
| | | ctggaatggatgggcatcatcaatccctcgggaggttccactagctacgcgcagaagttccaggga |
| | | agagtgaccatgaccagagacacctcgacttcgacggtgtacatggagctgagctccctgaggagc |
| | | gaggacactgccgtgtactactgcgcccggggcccgatcggatgcagcggggggtcctgtctcgat |
| | | tactggggccagggcacactcgtgaccgtgtccagcgggggcggtggtagcggaggagggggatcg |
| | | ggcggtggaggatcgcagtccgccctgacccaaccggcgtacgtgtctggatcacccggacagtcc |
| | | attaccatctcctgcaccggaaccaactcggacgtgggccgctacaactacgtgtcatggtaccag |
| | | cagcaccccgggaaggctcctaagctgatgatctacgaggtgtcctatcggcctagcggtgtcagc |
| | | aaccggttctccggctccaagtccggcaacactgcttcccttaccatttccgggttgcaagccgag |
| | | gacgaggccgattactactgttcctcctataccacttcatccaccctggactttggaaccggcacc |
| | | aaggtcaccgtgctg |
| CAR22-20 | 318 | atggccctccctgtcaccgccctgctgcttccgctggctcttctgctccacgccgctcggcccgaa |
| soluble | | gtgcaactcgtcgaatcaggagcagaagtcaagaaaccaggagcctccgtgaaagtcagctgcaag |
| scFV NT | | gcctcgggctacactttcacttcctactacatgcattgggtgcgccaggccccgggccagggactg |
| | | gaatggatgggcatcatcaatccctcgggaggttccactagctacgcgcagaagttccagggaaga |
| | | gtgaccatgaccagagacacctcgacttcgacggtgtacatggagctgagctccctgaggagcgag |
| | | gacactgccgtgtactactgcgcccggggcccgatcggatgcagcggggggtcctgtctcgattac |
| | | tggggccagggcacactcgtgaccgtgtccagcgggggcggtggtagcggaggagggggatcgggc |
| | | ggtggaggatcgcagtccgccctgacccaaccggcgtacgtgtctggatcacccggacagtccatt |
| | | accatctcctgcaccggaaccaactcggacgtgggccgctacaactacgtgtcatggtaccagcag |
| | | caccccgggaaggctcctaagctgatgatctacgaggtgtcctatcggcctagcggtgtcagcaac |
| | | cggttctccggctccaagtccggcaacactgcttcccttaccatttccgggttgcaagccgaggac |
| | | gaggccgattactactgttcctcctataccacttcatccaccctggactttggaaccggcaccaag |
| | | gtcaccgtgctgggatcgcaccaccatcaccatcatcatcac |
| CAR22-20 | 319 | malpvtalllplalllhaarpevqlvesgaevkkpgasvkvsckasgytftsyymhwvrqapgqgl |
| soluble | | ewmgiinpsggstsyaqkfqgrvtmtrdtststvymelsslrsedtavyycargpigcsggscldy |
| scFV AA | | wgqgtlvtvssggggsggggsggggsqsaltqpayvsgspgqsitisctgtnsdvgrynyvswyqq |
| | | hpgkapklmiyevsyrpsgvsnrfsgsksgntasltisglqaedeadyycssyttsstldfgtgtk |
| | | vtvlgshhhhhhhh |
| CAR22-20 | 320 | malpvtalllplalllhaarpevqlvesgaevkkpgasvkvsckasgytftsyymhwvrqapgqgl |
| Full AA | | ewmgiinpsggstsyaqkfqgrvtmtrdtststvymelsslrsedtavyycargpigcsggscldy |
| | | wgqgtlvtvssggggsggggsggggsqsaltqpayvsgspgqsitisctgtnsdvgrynyvswyqq |
| | | hpgkapklmiyevsyrpsgvsnrfsgsksgntasltisglqaedeadyycssyttsstldfgtgtk |
| | | vtvltttpaprpptpaptiasqplslrpeacrpaaggavhtrgldfacdiyiwaplagtcgvllls |
| | | lvitlyckrgrkkllyifkqpfmrpvqttqeedgcscrfpeeeeggcelrvkfsrsadapaykqgq |
| | | nqlynelnlgrreeydvldkrrgrdpemggkprrknpqeglynelqkdkmaeayseigmkgerrrg |
| | | kghdglyqglstatkdtydalhmqalppr |
| CAR22-20 | 321 | atggccctccctgtcaccgccctgctgcttccgctggctcttctgctccacgccgctcggcccgaa |
| Full NT | | gtgcaactcgtcgaatcaggagcagaagtcaagaaaccaggagcctccgtgaaagtcagctgcaag |
| | | gcctcgggctacactttcacttcctactacatgcattgggtgcgccaggccccgggccagggactg |
| | | gaatggatgggcatcatcaatccctcgggaggttccactagctacgcgcagaagttccagggaaga |
| | | gtgaccatgaccagagacacctcgacttcgacggtgtacatggagctgagctccctgaggagcgag |
| | | gacactgccgtgtactactgcgcccggggcccgatcggatgcagcggggggtcctgtctcgattac |
| | | tggggccagggcacactcgtgaccgtgtccagcgggggcggtggtagcggaggagggggatcgggc |
| | | ggtggaggatcgcagtccgccctgacccaaccggcgtacgtgtctggatcacccggacagtccatt |
| | | accatctcctgcaccggaaccaactcggacgtgggccgctacaactacgtgtcatggtaccagcag |
| | | caccccgggaaggctcctaagctgatgatctacgaggtgtcctatcggcctagcggtgtcagcaac |
| | | cggttctccggctccaagtccggcaacactgcttcccttaccatttccgggttgcaagccgaggac |
| | | gaggccgattactactgttcctcctataccacttcatccaccctggactttggaaccggcaccaag |
| | | gtcaccgtgctgaccactaccccagcaccgaggccacccaccccggctcctaccatcgcctcccag |
| | | cctctgtccctgcgtccggaggcatgtagacccgcagctggtggggccgtgcatacccggggtctt |
| | | gacttcgcctgcgatatctacatttgggcccctctggctggtacttgcggggtcctgctgctttca |
| | | ctcgtgatcactctttactgtaagcgcggtcggaagaagctgctgtacatctttaagcaacccttc |
| | | atgaggcctgtgcagactactcaagaggaggacggctgttcatgccggttcccagaggaggaggaa |
| | | ggcggctgcgaactgcgcgtgaaattcagccgcagcgcagatgctccagcctacaagcaggggcag |
| | | aaccagctctacaacgaactcaatcttggtcggagagaggagtacgacgtgctggacaagcggaga |
| | | ggacgggacccagaaatgggcgggaagccgcgcagaaagaatccccaagagggcctgtacaacgag |
| | | ctccaaaaggataagatggcagaagcctatagcgagattggtatgaaaggggaacgcagaagaggc |
| | | aaaggccacgacggactgtaccagggactcagcaccgccaccaaggacacctatgacgctcttcac |
| | | atgcaggccctgccgcctcgg |
| CAR22-21 | 322 | qvqlvqsgaevkkpgasvkvsckasgytftsyymhwvrqapgqglewmgiinpsggstsyaqkfqg |
| scFv | | rvtmtrdtststvymelsslrsedtavyycargsygdygdafdiwgqgttvtvssggggsggggsg |
| AA | | sggsqsaltqpasvsgspgqsitisctgtssdvggykyvswyqqhpgkapklmiydvsnrpsgvsn |
| | | rfsgsksgntasltisglqaedeadyycssytssstlvfgggtkltvl |
| CAR22-21 | 323 | caagtgcaactcgtccagtccggtgcagaagtcaagaaacccggagcctccgtgaaagtgtcctgc |
| scFv NT | | aaggcctcgggctacaccttcacctcctactacatgcactgggtgcgccaggcgccgggccaggga |
| | | cttgagtggatgggtatcatcaacccgtccggcggaagcacctcgtacgcccaaaagtttcagggg |
| | | agagtgaccatgaccagggacacttcaaccagcaccgtgtacatggaactgtcaagcttgcgctcc |
| | | gaggatactgccgtctactactgcgcccggggatcgtacggagactacggcgacgctttcgatatc |
| | | tggggacagggcacaaccgtgaccgtgtcctccggcggagggggctcgggcggaggaggctcaggt |
| | | tccggcgggagccagtccgcactgactcagccagcgtccgtgagcggtagccctgggcagtctatc |
| | | acgatttcgtgcactggcacctcctccgacgtgggaggctataagtacgtcagctggtaccaacag |
| | | catccgggaaaggcgcctaagctgatgatctatgacgtcagcaaccggccctccggggtgtcaaac |
| | | cggttcagcggttccaagtcgggaaataccgcctccctgaccattagcgggctgcaggccgaagat |
| | | gaggctgactactactgttcctcctacacttcatcgtccactctcgtgttcgggggaggaactaag |
| | | ctcaccgtgctg |
| CAR22-21 | 324 | atggccctccctgtcaccgccctgctgcttccgctggctcttctgctccacgccgctcggccccaa |
| soluble | | gtgcaactcgtccagtccggtgcagaagtcaagaaacccggagcctccgtgaaagtgtcctgcaag |
| scFV NT | | gcctcgggctacaccttcacctcctactacatgcactgggtgcgccaggcgccgggccagggactt |
| | | gagtggatgggtatcatcaacccgtccggcggaagcacctcgtacgcccaaaagtttcaggggaga |
| | | gtgaccatgaccagggacacttcaaccagcaccgtgtacatggaactgtcaagcttgcgctccgag |
| | | gatactgccgtctactactgcgcccggggatcgtacggagactacggcgacgctttcgatatctgg |
| | | ggacagggcacaaccgtgaccgtgtcctccggcggagggggctcgggcggaggaggctcaggttcc |
| | | ggcgggagccagtccgcactgactcagccagcgtccgtgagcggtagccctgggcagtctatcacg |
| | | atttcgtgcactggcacctcctccgacgtgggaggctataagtacgtcagctggtaccaacagcat |
| | | ccgggaaaggcgcctaagctgatgatctatgacgtcagcaaccggccctccggggtgtcaaaccgg |
| | | ttcagcggttccaagtcgggaaataccgcctccctgaccattagcgggctgcaggccgaagatgag |
| | | gctgactactactgttcctcctacacttcatcgtccactctcgtgttcgggggaggaactaagctc |
| | | accgtgctgggatcgcaccaccatcaccatcatcatcac |
| CAR22-21 | 325 | malpvtalllplalllhaarpqvqlvqsgaevkkpgasvkvsckasgytftsyymhwvrqapgqgl |
| soluble | | ewmgiinpsggstsyaqkfqgrvtmtrdtststvymelsslrsedtavyycargsygdygdafdiw |
| scFV AA | | gqgttvtvssggggsggggsgsggsqsaltqpasvsgspgqsitisctgtssdvggykyvswyqqh |
| | | pgkapklmiydvsnrpsgvsnrfsgsksgntasltisglqaedeadyycssytssstlvfgggtkl |
| | | tvlgshhhhhhhh |
| CAR22-21 | 326 | malpvtalllplalllhaarpqvqlvqsgaevkkpgasvkvsckasgytftsyymhwvrqapgqgl |
| Full AA | | ewmgiinpsggstsyaqkfqgrvtmtrdtststvymelsslrsedtavyycargsygdygdafdiw |
| | | gqgttvtvssggggsggggsgsggsqsaltqpasvsgspgqsitisctgtssdvggykyvswyqqh |
| | | pgkapklmiydvsnrpsgvsnrfsgsksgntasltisglqaedeadyycssytssstlvfgggtkl |
| | | tvltttpaprpptpaptiasqplslrpeacrpaaggavhtrgldfacdiyiwaplagtcgvlllsl |
| | | vitlyckrgrkkllyifkqpfmrpvqttqeedgcscrfpeeeeggcelrvkfsrsadapaykqgqn |
| | | qlynelnlgrreeydvldkrrgrdpemggkprrknpqeglynelqkdkmaeayseigmkgerrrgk |
| | | ghdglyqglstatkdtydalhmqalppr |
| CAR22-21 | 327 | atggccctccctgtcaccgccctgctgcttccgctggctcttctgctccacgccgctcggccccaa |
| Full NT | | gtgcaactcgtccagtccggtgcagaagtcaagaaacccggagcctccgtgaaagtgtcctgcaag |
| | | gcctcgggctacaccttcacctcctactacatgcactgggtgcgccaggcgccgggccagggactt |
| | | gagtggatgggtatcatcaacccgtccggcggaagcacctcgtacgcccaaaagtttcaggggaga |
| | | gtgaccatgaccagggacacttcaaccagcaccgtgtacatggaactgtcaagcttgcgctccgag |
| | | gatactgccgtctactactgcgcccggggatcgtacggagactacggcgacgctttcgatatctgg |
| | | ggacagggcacaaccgtgaccgtgtcctccggcggagggggctcgggcggaggaggctcaggttcc |
| | | ggcgggagccagtccgcactgactcagccagcgtccgtgagcggtagccctgggcagtctatcacg |
| | | atttcgtgcactggcacctcctccgacgtgggaggctataagtacgtcagctggtaccaacagcat |
| | | ccgggaaaggcgcctaagctgatgatctatgacgtcagcaaccggccctccggggtgtcaaaccgg |
| | | ttcagcggttccaagtcgggaaataccgcctccctgaccattagcgggctgcaggccgaagatgag |
| | | gctgactactactgttcctcctacacttcatcgtccactctcgtgttcgggggaggaactaagctc |
| | | accgtgctgaccactaccccagcaccgaggccacccaccccggctcctaccatcgcctcccagcct |
| | | ctgtccctgcgtccggaggcatgtagacccgcagctggtggggccgtgcatacccggggtcttgac |
| | | ttcgcctgcgatatctacatttgggcccctctggctggtacttgcggggtcctgctgctttcactc |
| | | gtgatcactctttactgtaagcgcggtcggaagaagctgctgtacatctttaagcaacccttcatg |
| | | aggcctgtgcagactactcaagaggaggacggctgttcatgccggttcccagaggaggaggaaggc |
| | | ggctgcgaactgcgcgtgaaattcagccgcagcgcagatgctccagcctacaagcaggggcagaac |
| | | cagctctacaacgaactcaatcttggtcggagagaggagtacgacgtgctggacaagcggagagga |
| | | cgggacccagaaatgggcgggaagccgcgcagaaagaatccccaagagggcctgtacaacgagctc |
| | | caaaaggataagatggcagaagcctatagcgagattggtatgaaaggggaacgcagaagaggcaaa |
| | | ggccacgacggactgtaccagggactcagcaccgccaccaaggacacctatgacgctcttcacatg |
| | | caggccctgccgcctcgg |
| CAR22-22 | 328 | evqlvesgaevkkpgssvkvsckasggtfssyaiswvrqapgqglewmggiipifgtanyaqkfqg |
| scFv | | rvtitadeststaymelsslrsedtavyycardhkvvrfgywgqgtlvtvssggggsggggsgggg |
| AA | | shviltqppsasaslgasvkltctlssghssyaiawhqqqpekgprylmkvnsdgslskgdgipdr |
| | | fsgstsgaeryltisslqsedeadyycqtwgsgmaifgggtkltvl |
| CAR22-22 | 329 | gaagtgcaattggtggaatcaggcgcagaagtcaagaaacccggaagcagcgtgaaagtgtcctgc |
| scFv NT | | aaggcctcaggaggcaccttctcgtcctatgccatttcctgggtccgccaggccccgggacagggc |
| | | ctggaatggatgggcggaattatccctatcttcggaaccgcgaactacgcccagaagtttcaggga |
| | | cgcgtgaccatcactgccgatgaatcaacctccactgcgtacatggaactgtcctccctgcggagc |
| | | gaggacaccgccgtgtactactgcgcaagggatcataaggtcgtgcggttcggatactggggacag |
| | | ggaacccttgtgaccgtgtcctccggcggcggggggtccggcggagggggttccgggggaggcgga |
| | | tcgcacgtgatcctgactcaaccaccctcagcctccgcctctctgggagccagcgtgaagctcacc |
| | | tgtactctgagctcgggacactcgtcgtacgccatcgcttggcaccagcagcagccggagaagggg |
| | | cctagatacctgatgaaggtcaactccgacggttcgctgagcaagggcgacggcatcccggatcgg |
| | | ttcagcggttccacgtccggcgcggagagatacctcacaatctcctcgctccaatccgaggacgag |
| | | gctgactactactgccagacctggggtagcggcatggcgattttcgggggtggaactaagctgacc |
| | | gtgctg |
| CAR22-22 | 330 | atggccctccctgtcaccgccctgctgcttccgctggctcttctgctccacgccgctcggcccgaa |
| soluble | | gtgcaattggtggaatcaggcgcagaagtcaagaaacccggaagcagcgtgaaagtgtcctgcaag |
| scFV NT | | gcctcaggaggcaccttctcgtcctatgccatttcctgggtccgccaggccccgggacagggcctg |
| | | gaatggatgggcggaattatccctatcttcggaaccgcgaactacgcccagaagtttcagggacgc |
| | | gtgaccatcactgccgatgaatcaacctccactgcgtacatggaactgtcctccctgcggagcgag |
| | | gacaccgccgtgtactactgcgcaagggatcataaggtcgtgcggttcggatactggggacaggga |
| | | acccttgtgaccgtgtcctccggcggcggggggtccggcggagggggttccgggggaggcggatcg |
| | | cacgtgatcctgactcaaccaccctcagcctccgcctctctgggagccagcgtgaagctcacctgt |
| | | actctgagctcgggacactcgtcgtacgccatcgcttggcaccagcagcagccggagaaggggcct |
| | | agatacctgatgaaggtcaactccgacggttcgctgagcaagggcgacggcatcccggatcggttc |
| | | agcggttccacgtccggcgcggagagatacctcacaatctcctcgctccaatccgaggacgaggct |
| | | gactactactgccagacctggggtagcggcatggcgattttcgggggtggaactaagctgaccgtg |
| | | ctgggatcgcaccaccatcaccatcatcatcac |
| CAR22-22 | 331 | malpvtalllplalllhaarpevqlvesgaevkkpgssvkvsckasggtfssyaiswvrqapgqgl |
| soluble | | ewmggiipifgtanyaqkfqgrvtitadeststaymelsslrsedtavyycardhkvvrfgywgqg |
| scFV AA | | tlvtvssggggsggggsggggshviltqppsasaslgasvkltctlssghssyaiawhqqqpekgp |
| | | rylmkvnsdgslskgdgipdrfsgstsgaeryltisslqsedeadyycqtwgsgmaifgggtkltv |
| | | lgshhhhhhhh |
| CAR22-22 | 332 | malpvtalllplalllhaarpevqlvesgaevkkpgssvkvsckasggtfssyaiswvrqapgqgl |
| Full AA | | ewmggiipifgtanyaqkfqgrvtitadeststaymelsslrsedtavyycardhkvvrfgywgqg |
| | | tlvtvssggggsggggsggggshviltqppsasaslgasvkltctlssghssyaiawhqqqpekgp |
| | | rylmkvnsdgslskgdgipdrfsgstsgaeryltisslqsedeadyycqtwgsgmaifgggtkltv |
| | | ltttpaprpptpaptiasqplslrpeacrpaaggavhtrgldfacdiyiwaplagtcgvlllslvi |
| | | tlyckrgrkkllyifkqpfmrpvqttqeedgcscrfpeeeeggcelrvkfsrsadapaykqgqnql |
| | | ynelnlgrreeydvldkrrgrdpemggkprrknpqeglynelqkdkmaeayseigmkgerrrgkgh |
| | | dglyqglstatkdtydalhmqalppr |
| CAR22-22 | 333 | atggccctccctgtcaccgccctgctgcttccgctggctcttctgctccacgccgctcggcccgaa |
| Full NT | | gtgcaattggtggaatcaggcgcagaagtcaagaaacccggaagcagcgtgaaagtgtcctgcaag |
| | | gcctcaggaggcaccttctcgtcctatgccatttcctgggtccgccaggccccgggacagggcctg |
| | | gaatggatgggcggaattatccctatcttcggaaccgcgaactacgcccagaagtttcagggacgc |
| | | gtgaccatcactgccgatgaatcaacctccactgcgtacatggaactgtcctccctgcggagcgag |
| | | gacaccgccgtgtactactgcgcaagggatcataaggtcgtgcggttcggatactggggacaggga |
| | | acccttgtgaccgtgtcctccggcggcggggggtccggcggagggggttccgggggaggcggatcg |
| | | cacgtgatcctgactcaaccaccctcagcctccgcctctctgggagccagcgtgaagctcacctgt |
| | | actctgagctcgggacactcgtcgtacgccatcgcttggcaccagcagcagccggagaaggggcct |
| | | agatacctgatgaaggtcaactccgacggttcgctgagcaagggcgacggcatcccggatcggttc |
| | | agcggttccacgtccggcgcggagagatacctcacaatctcctcgctccaatccgaggacgaggct |
| | | gactactactgccagacctggggtagcggcatggcgattttcgggggtggaactaagctgaccgtg |
| | | ctgaccactaccccagcaccgaggccacccaccccggctcctaccatcgcctcccagcctctgtcc |
| | | ctgcgtccggaggcatgtagacccgcagctggtggggccgtgcatacccggggtcttgacttcgcc |
| | | tgcgatatctacatttgggcccctctggctggtacttgcggggtcctgctgctttcactcgtgatc |
| | | actctttactgtaagcgcggtcggaagaagctgctgtacatctttaagcaacccttcatgaggcct |
| | | gtgcagactactcaagaggaggacggctgttcatgccggttcccagaggaggaggaaggcggctgc |
| | | gaactgcgcgtgaaattcagccgcagcgcagatgctccagcctacaagcaggggcagaaccagctc |
| | | tacaacgaactcaatcttggtcggagagaggagtacgacgtgctggacaagcggagaggacgggac |
| | | ccagaaatgggcgggaagccgcgcagaaagaatccccaagagggcctgtacaacgagctccaaaag |
| | | gataagatggcagaagcctatagcgagattggtatgaaaggggaacgcagaagaggcaaaggccac |
| | | gacggactgtaccagggactcagcaccgccaccaaggacacctatgacgctcttcacatgcaggcc |
| | | ctgccgcctcgg |
| CAR22-23 | 334 | qvqlvqsgaevkkpgasvkvsckasgytftsyymhwvrqapgqglewmgiinpsggstsyaqkfqg |
| scFv | | rvtmtrdtststvymelsslrsedtavyycargdyymdvwgkgttvtvssggggsggggsggggsq |
| AA | | saltqpasasgspgqsvtisctgtssdvggynyvswyqqhpgkapklmiyevskrpsgvpdrfsgs |
| | | ksgntasltisglqaedeadyycssytssgtlvfgggtkltvl |
| CAR22-23 | 335 | caagtgcaactcgtccagtccggtgcagaagtcaagaaacccggtgcttccgtgaaagtgtcctgc |
| scFv NT | | aaggcctcaggttacaccttcacctcctactacatgcattgggtccgccaagcccccggacaaggc |
| | | ctggagtggatgggaattatcaacccgtccggcggcagcacaagctacgcccagaagttccaggga |
| | | cgcgtgactatgaccagagatacctccacctccaccgtgtacatggaactgtcctcactccggtcg |
| | | gaagataccgccgtgtactactgtgcccggggagactactatatggacgtctggggaaagggcacc |
| | | accgtgactgtgtcgtcgggcggcgggggttcgggaggaggaggaagcggtggcgggggaagccag |
| | | tccgcactgactcagcccgcgtcggccagcgggagccctggccagagcgtgaccatttcgtgcacc |
| | | ggaacttcctctgacgtcggcggatacaactacgtgtcctggtaccagcagcaccctggaaaggcc |
| | | ccgaagctgatgatctacgaggtgtccaagaggccatccggcgtgccggaccggttttcgggatca |
| | | aagtccgggaacacggccagcctgaccatcagcgggcttcaggctgaggacgaagcggattactac |
| | | tgctcctcctatacttcatccggcaccttggtgttcggcggagggactaagctgactgtgctc |
| CAR22-23 | 336 | atggccctccctgtcaccgccctgctgcttccgctggctcttctgctccacgccgctcggccccaa |
| soluble | | gtgcaactcgtccagtccggtgcagaagtcaagaaacccggtgcttccgtgaaagtgtcctgcaag |
| scFV NT | | gcctcaggttacaccttcacctcctactacatgcattgggtccgccaagcccccggacaaggcctg |
| | | gagtggatgggaattatcaacccgtccggcggcagcacaagctacgcccagaagttccagggacgc |
| | | gtgactatgaccagagatacctccacctccaccgtgtacatggaactgtcctcactccggtcggaa |
| | | gataccgccgtgtactactgtgcccggggagactactatatggacgtctggggaaagggcaccacc |
| | | gtgactgtgtcgtcgggcggcgggggttcgggaggaggaggaagcggtggcgggggaagccagtcc |
| | | gcactgactcagcccgcgtcggccagcgggagccctggccagagcgtgaccatttcgtgcaccgga |
| | | acttcctctgacgtcggcggatacaactacgtgtcctggtaccagcagcaccctggaaaggccccg |
| | | aagctgatgatctacgaggtgtccaagaggccatccggcgtgccggaccggttttcgggatcaaag |
| | | tccgggaacacggccagcctgaccatcagcgggcttcaggctgaggacgaagcggattactactgc |
| | | tcctcctatacttcatccggcaccttggtgttcggcggagggactaagctgactgtgctcggatcg |
| | | caccaccatcaccatcatcatcac |
| CAR22-23 | 337 | malpvtalllplalllhaarpqvqlvqsgaevkkpgasvkvsckasgytftsyymhwvrqapgqgl |
| soluble | | ewmgiinpsggstsyaqkfqgrvtmtrdtststvymelsslrsedtavyycargdyymdvwgkgtt |
| scFV AA | | vtvssggggsggggsggggsqsaltqpasasgspgqsvtisctgtssdvggynyvswyqqhpgkap |
| | | klmiyevskrpsgvpdrfsgsksgntasltisglqaedeadyycssytssgtlvfgggtkltvlgs |
| | | hhhhhhhh |
| CAR22-23 | 338 | malpvtalllplalllhaarpqvqlvqsgaevkkpgasvkvsckasgytftsyymhwvrqapgqgl |
| Full AA | | ewmgiinpsggstsyaqkfqgrvtmtrdtststvymelsslrsedtavyycargdyymdvwgkgtt |
| | | vtvssggggsggggsggggsqsaltqpasasgspgqsvtisctgtssdvggynyvswyqqhpgkap |
| | | klmiyevskrpsgvpdrfsgsksgntasltisglqaedeadyycssytssgtlvfgggtkltvltt |
| | | tpaprpptpaptiasqplslrpeacrpaaggavhtrgldfacdiyiwaplagtcgvlllslvitly |
| | | ckrgrkkllyifkqpfmrpvqttqeedgcscrfpeeeeggcelrvkfsrsadapaykqgqnqlyne |
| | | lnlgrreeydvldkrrgrdpemggkprrknpqeglynelqkdkmaeayseigmkgerrrgkghdgl |
| | | yqglstatkdtydalhmqalppr |
| CAR22-23 | 339 | atggccctccctgtcaccgccctgctgcttccgctggctcttctgctccacgccgctcggccccaa |
| Full NT | | gtgcaactcgtccagtccggtgcagaagtcaagaaacccggtgcttccgtgaaagtgtcctgcaag |
| | | gcctcaggttacaccttcacctcctactacatgcattgggtccgccaagcccccggacaaggcctg |
| | | gagtggatgggaattatcaacccgtccggcggcagcacaagctacgcccagaagttccagggacgc |
| | | gtgactatgaccagagatacctccacctccaccgtgtacatggaactgtcctcactccggtcggaa |
| | | gataccgccgtgtactactgtgcccggggagactactatatggacgtctggggaaagggcaccacc |
| | | gtgactgtgtcgtcgggcggcgggggttcgggaggaggaggaagcggtggcgggggaagccagtcc |
| | | gcactgactcagcccgcgtcggccagcgggagccctggccagagcgtgaccatttcgtgcaccgga |
| | | acttcctctgacgtcggcggatacaactacgtgtcctggtaccagcagcaccctggaaaggccccg |
| | | aagctgatgatctacgaggtgtccaagaggccatccggcgtgccggaccggttttcgggatcaaag |
| | | tccgggaacacggccagcctgaccatcagcgggcttcaggctgaggacgaagcggattactactgc |
| | | tcctcctatacttcatccggcaccttggtgttcggcggagggactaagctgactgtgctcaccact |
| | | accccagcaccgaggccacccaccccggctcctaccatcgcctcccagcctctgtccctgcgtccg |
| | | gaggcatgtagacccgcagctggtggggccgtgcatacccggggtcttgacttcgcctgcgatatc |
| | | tacatttgggcccctctggctggtacttgcggggtcctgctgctttcactcgtgatcactctttac |
| | | tgtaagcgcggtcggaagaagctgctgtacatctttaagcaacccttcatgaggcctgtgcagact |
| | | actcaagaggaggacggctgttcatgccggttcccagaggaggaggaaggcggctgcgaactgcgc |
| | | gtgaaattcagccgcagcgcagatgctccagcctacaagcaggggcagaaccagctctacaacgaa |
| | | ctcaatcttggtcggagagaggagtacgacgtgctggacaagcggagaggacgggacccagaaatg |
| | | ggcgggaagccgcgcagaaagaatccccaagagggcctgtacaacgagctccaaaaggataagatg |
| | | gcagaagcctatagcgagattggtatgaaaggggaacgcagaagaggcaaaggccacgacggactg |
| | | taccagggactcagcaccgccaccaaggacacctatgacgctcttcacatgcaggccctgccgcct |
| | | cgg |
| CAR22-24 | 340 | evqlvesggglvqpggslrlscaasgftfssyamswvrqapgkglewvsyissssstiyyadsvkg |
| scFv | | rftisrdnaknslylqmnslraedtavyycardgpiryfdhskafdiwgqgtmvtvssggggsggg |
| AA | | gsggggssseltqdpavsvalgqtvritcqgdslrsyyaswyqqkpgqapvlviygknnrpsgipd |
| | | rfsgsssgntasltitgaqaedeadyyrnsrdssgnpyvfgtgtkvtvl |
| CAR22-24 | 341 | gaagtgcaattggtggaatcaggaggaggacttgtgcaacctggaggatctctgagactgtcatgc |
| scFv NT | | gccgcgtcgggattcactttctcctcctacgcaatgtcgtgggtcagacaggcccccggaaagggc |
| | | ctggaatgggtgtcatacatcagctcctcctcctccacgatctactacgccgactctgtgaagggg |
| | | cggttcaccattagccgggacaacgcaaagaactccctgtatctgcaaatgaacagcctcagggcg |
| | | gaagataccgccgtgtactactgtgcgcgcgatggtccgattcgctatttcgaccactccaaggcc |
| | | ttcgatatctggggccagggaaccatggtcaccgtgtcgtccggtggaggcggcagcggggggggc |
| | | ggaagcggcggcgggggttcatcctcggagctgactcaggaccccgccgtgtccgtggctctggga |
| | | cagaccgtgcgcatcacatgccagggagattccctgcggtcgtactacgcctcctggtaccagcag |
| | | aaaccgggccaggcccccgtcctcgtgatctacggaaagaacaacaggccttcgggtatcccagac |
| | | cggttcagcggcagctccagcggaaacaccgcaagcctcactattaccggggcccaggctgaggac |
| | | gaggccgactactaccggaactcccgcgactcctcgggcaatccgtacgtctttggtactgggacc |
| | | aaggtcaccgtgctg |
| CAR22-24 | 342 | atggccctccctgtcaccgccctgctgcttccgctggctcttctgctccacgccgctcggcccgaa |
| soluble | | gtgcaattggtggaatcaggaggaggacttgtgcaacctggaggatctctgagactgtcatgcgcc |
| scFV NT | | gcgtcgggattcactttctcctcctacgcaatgtcgtgggtcagacaggcccccggaaagggcctg |
| | | gaatgggtgtcatacatcagctcctcctcctccacgatctactacgccgactctgtgaaggggcgg |
| | | ttcaccattagccgggacaacgcaaagaactccctgtatctgcaaatgaacagcctcagggcggaa |
| | | gataccgccgtgtactactgtgcgcgcgatggtccgattcgctatttcgaccactccaaggccttc |
| | | gatatctggggccagggaaccatggtcaccgtgtcgtccggtggaggcggcagcggggggggcgga |
| | | agcggcggcgggggttcatcctcggagctgactcaggaccccgccgtgtccgtggctctgggacag |
| | | accgtgcgcatcacatgccagggagattccctgcggtcgtactacgcctcctggtaccagcagaaa |
| | | ccgggccaggcccccgtcctcgtgatctacggaaagaacaacaggccttcgggtatcccagaccgg |
| | | ttcagcggcagctccagcggaaacaccgcaagcctcactattaccggggcccaggctgaggacgag |
| | | gccgactactaccggaactcccgcgactcctcgggcaatccgtacgtctttggtactgggaccaag |
| | | gtcaccgtgctgggatcgcaccaccatcaccatcatcatcac |
| CAR22-24 | 343 | malpvtalllplalllhaarpevqlvesggglvqpggslrlscaasgftfssyamswvrqapgkgl |
| soluble | | ewvsyissssstiyyadsvkgrftisrdnaknslylqmnslraedtavyycardgpiryfdhskaf |
| scFV AA | | diwgqgtmvtvssggggsggggsggggssseltqdpavsvalgqtvritcqgdslrsyyaswyqqk |
| | | pgqapvlviygknnrpsgipdrfsgsssgntasltitgaqaedeadyyrnsrdssgnpyvfgtgtk |
| | | vtvlgshhhhhhhh |
| CAR22-24 | 344 | malpvtalllplalllhaarpevqlvesggglvqpggslrlscaasgftfssyamswvrqapgkgl |
| Full AA | | ewvsyissssstiyyadsvkgrftisrdnaknslylqmnslraedtavyycardgpiryfdhskaf |
| | | diwgqgtmvtvssggggsggggsggggssseltqdpavsvalgqtvritcqgdslrsyyaswyqqk |
| | | pgqapvlviygknnrpsgipdrfsgsssgntasltitgaqaedeadyyrnsrdssgnpyvfgtgtk |
| | | vtvltttpaprpptpaptiasqplslrpeacrpaaggavhtrgldfacdiyiwaplagtcgvllls |
| | | lvitlyckrgrkkllyifkqpfmrpvqttqeedgcscrfpeeeeggcelrvkfsrsadapaykqgq |
| | | nqlynelnlgrreeydvldkrrgrdpemggkprrknpqeglynelqkdkmaeayseigmkgerrrg |
| | | kghdglyqglstatkdtydalhmqalppr |
| CAR22-24 | 345 | atggccctccctgtcaccgccctgctgcttccgctggctcttctgctccacgccgctcggcccgaa |
| Full NT | | gtgcaattggtggaatcaggaggaggacttgtgcaacctggaggatctctgagactgtcatgcgcc |
| | | gcgtcgggattcactttctcctcctacgcaatgtcgtgggtcagacaggcccccggaaagggcctg |
| | | gaatgggtgtcatacatcagctcctcctcctccacgatctactacgccgactctgtgaaggggcgg |
| | | ttcaccattagccgggacaacgcaaagaactccctgtatctgcaaatgaacagcctcagggcggaa |
| | | gataccgccgtgtactactgtgcgcgcgatggtccgattcgctatttcgaccactccaaggccttc |
| | | gatatctggggccagggaaccatggtcaccgtgtcgtccggtggaggcggcagcggggggggcgga |
| | | agcggcggcgggggttcatcctcggagctgactcaggaccccgccgtgtccgtggctctgggacag |
| | | accgtgcgcatcacatgccagggagattccctgcggtcgtactacgcctcctggtaccagcagaaa |
| | | ccgggccaggcccccgtcctcgtgatctacggaaagaacaacaggccttcgggtatcccagaccgg |
| | | ttcagcggcagctccagcggaaacaccgcaagcctcactattaccggggcccaggctgaggacgag |
| | | gccgactactaccggaactcccgcgactcctcgggcaatccgtacgtctttggtactgggaccaag |
| | | gtcaccgtgctgaccactaccccagcaccgaggccacccaccccggctcctaccatcgcctcccag |
| | | cctctgtccctgcgtccggaggcatgtagacccgcagctggtggggccgtgcatacccggggtctt |
| | | gacttcgcctgcgatatctacatttgggcccctctggctggtacttgcggggtcctgctgctttca |
| | | ctcgtgatcactctttactgtaagcgcggtcggaagaagctgctgtacatctttaagcaacccttc |
| | | atgaggcctgtgcagactactcaagaggaggacggctgttcatgccggttcccagaggaggaggaa |
| | | ggcggctgcgaactgcgcgtgaaattcagccgcagcgcagatgctccagcctacaagcaggggcag |
| | | aaccagctctacaacgaactcaatcttggtcggagagaggagtacgacgtgctggacaagcggaga |
| | | ggacgggacccagaaatgggcgggaagccgcgcagaaagaatccccaagagggcctgtacaacgag |
| | | ctccaaaaggataagatggcagaagcctatagcgagattggtatgaaaggggaacgcagaagaggc |
| | | aaaggccacgacggactgtaccagggactcagcaccgccaccaaggacacctatgacgctcttcac |
| | | atgcaggccctgccgcctcgg |
| CAR22-25 | 346 | qvqlvqsgaevkkpgasvkvsckasgytftsyymhwvrqapgqglewmgiinpsggstsyaqkfqg |
| scFv | | rvtmtrdtsistaymelsrlrsddtavyycaremddssgpdywgqgtlvtvssggggsggggsggg |
| AA | | gsqsaltqpasvsgspgqsitisctgtssdvggynyvswyqqhpgkapklmiyevsnrpsgvsnrf |
| | | sgsksgntasltisglqaedeadyycssytssstlvfgtgtkltvl |
| CAR22-25 | 347 | caagtgcagctcgtccagtccggtgcagaagtcaagaaacccggtgcttccgtgaaagtgtcctgc |
| scFv NT | | aaggcatccggctacacgttcacctcctactacatgcattgggtccgccaagcccccggccaaggc |
| | | ctggagtggatggggatcattaacccaagcggaggaagcactagctacgcgcagaagtttcagggc |
| | | cgcgtgaccatgaccagggatacttccatctccaccgcttacatggaactgtcgcggctgagaagc |
| | | gacgacacagccgtgtactactgtgcccgggaaatggacgactcctccgggcctgattactgggga |
| | | caggggactctggtcaccgtgtcgtccggtggaggcggatcggggggcggaggttccggcggaggg |
| | | ggctcacagtccgcgctgacccagccggccagcgtgtcaggatcaccgggccagagcatcaccatt |
| | | tcctgcaccggaacctcatcggacgtcggcggatataactacgtgtcgtggtaccagcagcaccct |
| | | ggaaaggccccgaagctcatgatctacgaggtgtccaatagacccagcggagtgtcgaaccggttc |
| | | agcgggtccaagtcgggaaacaccgccagcttgaccatctctggactgcaagccgaggacgaagcc |
| | | gattactactgctcctcgtatacttcctcctcaacccttgtgttcggaactggcactaagctgacc |
| | | gtgctc |
| CAR22-25 | 348 | atggccctccctgtcaccgccctgctgcttccgctggctcttctgctccacgccgctcggccccaa |
| soluble | | gtgcagctcgtccagtccggtgcagaagtcaagaaacccggtgcttccgtgaaagtgtcctgcaag |
| scFV NT | | gcatccggctacacgttcacctcctactacatgcattgggtccgccaagcccccggccaaggcctg |
| | | gagtggatggggatcattaacccaagcggaggaagcactagctacgcgcagaagtttcagggccgc |
| | | gtgaccatgaccagggatacttccatctccaccgcttacatggaactgtcgcggctgagaagcgac |
| | | gacacagccgtgtactactgtgcccgggaaatggacgactcctccgggcctgattactggggacag |
| | | gggactctggtcaccgtgtcgtccggtggaggcggatcggggggcggaggttccggcggagggggc |
| | | tcacagtccgcgctgacccagccggccagcgtgtcaggatcaccgggccagagcatcaccatttcc |
| | | tgcaccggaacctcatcggacgtcggcggatataactacgtgtcgtggtaccagcagcaccctgga |
| | | aaggccccgaagctcatgatctacgaggtgtccaatagacccagcggagtgtcgaaccggttcagc |
| | | gggtccaagtcgggaaacaccgccagcttgaccatctctggactgcaagccgaggacgaagccgat |
| | | tactactgctcctcgtatacttcctcctcaacccttgtgttcggaactggcactaagctgaccgtg |
| | | ctcggatcgcaccaccatcaccatcatcatcac |
| CAR22-25 | 349 | malpvtalllplalllhaarpqvqlvqsgaevkkpgasvkvsckasgytftsyymhwvrqapgqgl |
| soluble | | ewmgiinpsggstsyaqkfqgrvtmtrdtsistaymelsrlrsddtavyycaremddssgpdywgq |
| scFV AA | | gtlvtvssggggsggggsggggsqsaltqpasvsgspgqsitisctgtssdvggynyvswyqqhpg |
| | | kapklmiyevsnrpsgvsnrfsgsksgntasltisglqaedeadyycssytssstlvfgtgtkltv |
| | | lgshhhhhhhh |
| CAR22-25 | 350 | malpvtalllplalllhaarpqvqlvqsgaevkkpgasvkvsckasgytftsyymhwvrqapgqgl |
| Full AA | | ewmgiinpsggstsyaqkfqgrvtmtrdtsistaymelsrlrsddtavyycaremddssgpdywgq |
| | | gtlvtvssggggsggggsggggsqsaltqpasvsgspgqsitisctgtssdvggynyvswyqqhpg |
| | | kapklmiyevsnrpsgvsnrfsgsksgntasltisglqaedeadyycssytssstlvfgtgtkltv |
| | | ltttpaprpptpaptiasqplslrpeacrpaaggavhtrgldfacdiyiwaplagtcgvlllslvi |
| | | tlyckrgrkkllyifkqpfmrpvqttqeedgcscrfpeeeeggcelrvkfsrsadapaykqgqnql |
| | | ynelnlgrreeydvldkrrgrdpemggkprrknpqeglynelqkdkmaeayseigmkgerrrgkgh |
| | | dglyqglstatkdtydalhmqalppr |
| CAR22-25 | 351 | atggccctccctgtcaccgccctgctgcttccgctggctcttctgctccacgccgctcggccccaa |
| Full NT | | gtgcagctcgtccagtccggtgcagaagtcaagaaacccggtgcttccgtgaaagtgtcctgcaag |
| | | gcatccggctacacgttcacctcctactacatgcattgggtccgccaagcccccggccaaggcctg |
| | | gagtggatggggatcattaacccaagcggaggaagcactagctacgcgcagaagtttcagggccgc |
| | | gtgaccatgaccagggatacttccatctccaccgcttacatggaactgtcgcggctgagaagcgac |
| | | gacacagccgtgtactactgtgcccgggaaatggacgactcctccgggcctgattactggggacag |
| | | gggactctggtcaccgtgtcgtccggtggaggcggatcggggggcggaggttccggcggagggggc |
| | | tcacagtccgcgctgacccagccggccagcgtgtcaggatcaccgggccagagcatcaccatttcc |
| | | tgcaccggaacctcatcggacgtcggcggatataactacgtgtcgtggtaccagcagcaccctgga |
| | | aaggccccgaagctcatgatctacgaggtgtccaatagacccagcggagtgtcgaaccggttcagc |
| | | gggtccaagtcgggaaacaccgccagcttgaccatctctggactgcaagccgaggacgaagccgat |
| | | tactactgctcctcgtatacttcctcctcaacccttgtgttcggaactggcactaagctgaccgtg |
| | | ctcaccactaccccagcaccgaggccacccaccccggctcctaccatcgcctcccagcctctgtcc |
| | | ctgcgtccggaggcatgtagacccgcagctggtggggccgtgcatacccggggtcttgacttcgcc |
| | | tgcgatatctacatttgggcccctctggctggtacttgcggggtcctgctgctttcactcgtgatc |
| | | actctttactgtaagcgcggtcggaagaagctgctgtacatctttaagcaacccttcatgaggcct |
| | | gtgcagactactcaagaggaggacggctgttcatgccggttcccagaggaggaggaaggcggctgc |
| | | gaactgcgcgtgaaattcagccgcagcgcagatgctccagcctacaagcaggggcagaaccagctc |
| | | tacaacgaactcaatcttggtcggagagaggagtacgacgtgctggacaagcggagaggacgggac |
| | | ccagaaatgggcgggaagccgcgcagaaagaatccccaagagggcctgtacaacgagctccaaaag |
| | | gataagatggcagaagcctatagcgagattggtatgaaaggggaacgcagaagaggcaaaggccac |
| | | gacggactgtaccagggactcagcaccgccaccaaggacacctatgacgctcttcacatgcaggcc |
| | | ctgccgcctcgg |
| CAR22-26 | 352 | evqlvesgaevkkpgeslkisckgsgysftgswigwgrqmpgkglewmgiiypgdsdtryspsfqg |
| scFv | | qvtisadksistaylqwsslkasdtamyycargflrggdccgaldiwgqgtmvtvssggggsgggg |
| AA | | sggggsdivmtqsplslpvtpgepasiscrssqsllhsngynyldwylqkpgqspqlliylgsnra |
| | | sgvpdrfsgsgsgtdftlkisrveaedvgvyycmqalqtppwtfgqgtkleikr |
| CAR22-26 | 353 | gaagtgcagttggtggaatcaggagcagaagtcaagaaacccggagaaagcctgaagatctcgtgc |
| scFv NT | | aaagggagcggatactcgttcaccggatcatggattggatggggccgccagatgcctggaaagggt |
| | | ctggaatggatgggaatcatctacccgggggactccgatactcggtactccccgagctttcagggc |
| | | caggtcaccatctccgccgacaagtccatctccactgcgtatttgcagtggagctcactgaaggcc |
| | | tcggacaccgctatgtactactgcgcccgcggtttcctgaggggcggagattgttgcggcgccctt |
| | | gatatctggggccaggggaccatggtgaccgtgtcctccggtggtggcggctccggcggaggaggg |
| | | tccgggggaggaggctccgacattgtgatgacccagagccccctgtccctgcccgtgactcctggg |
| | | gagccagcctcgatcagctgccggtcgtcccagtcccttctgcactccaacggctacaactatctc |
| | | gattggtacctccagaagcctggtcaaagcccgcagctgctgatctacctcggttcaaacagagct |
| | | tccggggtgccggacagattcagcggatctggatcgggcacagacttcacgctcaagatttcccgc |
| | | gtggaggccgaggacgtcggcgtgtactactgtatgcaagcgctgcagaccccgccctggactttc |
| | | ggacaaggaaccaagctggagattaagcgg |
| CAR22-26 | 354 | atggccctccctgtcaccgccctgctgcttccgctggctcttctgctccacgccgctcggcccgaa |
| soluble | | gtgcagttggtggaatcaggagcagaagtcaagaaacccggagaaagcctgaagatctcgtgcaaa |
| scFV NT | | gggagcggatactcgttcaccggatcatggattggatggggccgccagatgcctggaaagggtctg |
| | | gaatggatgggaatcatctacccgggggactccgatactcggtactccccgagctttcagggccag |
| | | gtcaccatctccgccgacaagtccatctccactgcgtatttgcagtggagctcactgaaggcctcg |
| | | gacaccgctatgtactactgcgcccgcggtttcctgaggggcggagattgttgcggcgcccttgat |
| | | atctggggccaggggaccatggtgaccgtgtcctccggtggtggcggctccggcggaggagggtcc |
| | | gggggaggaggctccgacattgtgatgacccagagccccctgtccctgcccgtgactcctggggag |
| | | ccagcctcgatcagctgccggtcgtcccagtcccttctgcactccaacggctacaactatctcgat |
| | | tggtacctccagaagcctggtcaaagcccgcagctgctgatctacctcggttcaaacagagcttcc |
| | | ggggtgccggacagattcagcggatctggatcgggcacagacttcacgctcaagatttcccgcgtg |
| | | gaggccgaggacgtcggcgtgtactactgtatgcaagcgctgcagaccccgccctggactttcgga |
| | | caaggaaccaagctggagattaagcggggatcgcaccaccatcaccatcatcatcac |
| CAR22-26 | 355 | malpvtalllplalllhaarpevqlvesgaevkkpgeslkisckgsgysftgswigwgrqmpgkgl |
| soluble | | ewmgiiypgdsdtryspsfqgqvtisadksistaylqwsslkasdtamyycargflrggdccgald |
| scFV AA | | iwgqgtmvtvssggggsggggsggggsdivmtqsplslpvtpgepasiscrssqsllhsngynyld |
| | | wylqkpgqspqlliylgsnrasgvpdrfsgsgsgtdftlkisrveaedvgvyycmqalqtppwtfg |
| | | qgtkleikrgshhhhhhhh |
| CAR22-26 | 356 | malpvtalllplalllhaarpevqlvesgaevkkpgeslkisckgsgysftgswigwgrqmpgkgl |
| Full AA | | ewmgiiypgdsdtryspsfqgqvtisadksistaylqwsslkasdtamyycargflrggdccgald |
| | | iwgqgtmvtvssggggsggggsggggsdivmtqsplslpvtpgepasiscrssqsllhsngynyld |
| | | wylqkpgqspqlliylgsnrasgvpdrfsgsgsgtdftlkisrveaedvgvyycmqalqtppwtfg |
| | | qgtkleikrtttpaprpptpaptiasqplslrpeacrpaaggavhtrgldfacdiyiwaplagtcg |
| | | vlllslvitlyckrgrkkllyifkqpfmrpvqttqeedgcscrfpeeeeggcelrvkfsrsadapa |
| | | ykqgqnqlynelnlgrreeydvldkrrgrdpemggkprrknpqeglynelqkdkmaeayseigmkg |
| | | errrgkghdglyqglstatkdtydalhmqalppr |
| CAR22-26 | 357 | atggccctccctgtcaccgccctgctgcttccgctggctcttctgctccacgccgctcggcccgaa |
| Full NT | | gtgcagttggtggaatcaggagcagaagtcaagaaacccggagaaagcctgaagatctcgtgcaaa |
| | | gggagcggatactcgttcaccggatcatggattggatggggccgccagatgcctggaaagggtctg |
| | | gaatggatgggaatcatctacccgggggactccgatactcggtactccccgagctttcagggccag |
| | | gtcaccatctccgccgacaagtccatctccactgcgtatttgcagtggagctcactgaaggcctcg |
| | | gacaccgctatgtactactgcgcccgcggtttcctgaggggcggagattgttgcggcgcccttgat |
| | | atctggggccaggggaccatggtgaccgtgtcctccggtggtggcggctccggcggaggagggtcc |
| | | gggggaggaggctccgacattgtgatgacccagagccccctgtccctgcccgtgactcctggggag |
| | | ccagcctcgatcagctgccggtcgtcccagtcccttctgcactccaacggctacaactatctcgat |
| | | tggtacctccagaagcctggtcaaagcccgcagctgctgatctacctcggttcaaacagagcttcc |
| | | ggggtgccggacagattcagcggatctggatcgggcacagacttcacgctcaagatttcccgcgtg |
| | | gaggccgaggacgtcggcgtgtactactgtatgcaagcgctgcagaccccgccctggactttcgga |
| | | caaggaaccaagctggagattaagcggaccactaccccagcaccgaggccacccaccccggctcct |
| | | accatcgcctcccagcctctgtccctgcgtccggaggcatgtagacccgcagctggtggggccgtg |
| | | catacccggggtcttgacttcgcctgcgatatctacatttgggcccctctggctggtacttgcggg |
| | | gtcctgctgctttcactcgtgatcactctttactgtaagcgcggtcggaagaagctgctgtacatc |
| | | tttaagcaacccttcatgaggcctgtgcagactactcaagaggaggacggctgttcatgccggttc |
| | | ccagaggaggaggaaggcggctgcgaactgcgcgtgaaattcagccgcagcgcagatgctccagcc |
| | | tacaagcaggggcagaaccagctctacaacgaactcaatcttggtcggagagaggagtacgacgtg |
| | | ctggacaagcggagaggacgggacccagaaatgggcgggaagccgcgcagaaagaatccccaagag |
| | | ggcctgtacaacgagctccaaaaggataagatggcagaagcctatagcgagattggtatgaaaggg |
| | | gaacgcagaagaggcaaaggccacgacggactgtaccagggactcagcaccgccaccaaggacacc |
| | | tatgacgctcttcacatgcaggccctgccgcctcgg |
| CAR22-27 | 358 | qvqlqesgpglvkpsetlsltcsvsggsinsyywswirqapgkglewiaftshsgnvkynpsltgr |
| scFv | | vtiavdtsknqfylevtsvtaadtavyfcargldplfaydafeiwglgtmvtvssggggsggggsg |
| AA | | gggseivltqsplslpvtpgepasiscrssqsllhsngynyldwylqkpgqspqlliylgsnrasg |
| | | vpdrfsgsgsgtdftlkisrveaedvgvyycmqvlqtppltfgggtkvdikr |
| CAR22-27 | 359 | caagtgcaacttcaggaatcaggccccggacttgtgaaaccatcagaaactctctccctcacttgc |
| scFv NT | | tccgtgagcggggggtccatcaactcctactactggtcgtggattagacaggcccctggaaagggg |
| | | ctggagtggatcgcgttcacttcgcactccggcaacgtcaagtacaacccgtccctgaccggaaga |
| | | gtgaccattgccgtggatacctccaagaaccagttctacctggaagtcacgtcggtgaccgctgct |
| | | gacaccgccgtgtacttctgcgcacgggggctggacccattgtttgcctacgatgcgttcgaaatc |
| | | tgggggctcggaaccatggtcactgtgtcctccggcggaggcggcagcggtggaggaggcagcgga |
| | | ggaggaggttccgagatcgtgctgacccagagccccctgtccctccccgtgacccctggagaaccg |
| | | gccagcatttcctgccggtcgagccagtccctgttgcattcaaatggctacaactacctggattgg |
| | | tatctgcagaagcccggccagtcaccgcaactgctcatctacctgggaagcaaccgcgcctcgggt |
| | | gtcccggaccgcttctccggctcggggtctggcactgacttcacactgaagatctccagggtggag |
| | | gccgaggacgtgggagtgtattactgtatgcaagtgctgcagaccccgcctctgaccttcggcggt |
| | | ggaactaaggtcgacatcaagcgg |
| CAR22-27 | 360 | atggccctccctgtcaccgccctgctgcttccgctggctcttctgctccacgccgctcggccccaa |
| soluble | | gtgcaacttcaggaatcaggccccggacttgtgaaaccatcagaaactctctccctcacttgctcc |
| scFV NT | | gtgagcggggggtccatcaactcctactactggtcgtggattagacaggcccctggaaaggggctg |
| | | gagtggatcgcgttcacttcgcactccggcaacgtcaagtacaacccgtccctgaccggaagagtg |
| | | accattgccgtggatacctccaagaaccagttctacctggaagtcacgtcggtgaccgctgctgac |
| | | accgccgtgtacttctgcgcacgggggctggacccattgtttgcctacgatgcgttcgaaatctgg |
| | | gggctcggaaccatggtcactgtgtcctccggcggaggcggcagcggtggaggaggcagcggagga |
| | | ggaggttccgagatcgtgctgacccagagccccctgtccctccccgtgacccctggagaaccggcc |
| | | agcatttcctgccggtcgagccagtccctgttgcattcaaatggctacaactacctggattggtat |
| | | ctgcagaagcccggccagtcaccgcaactgctcatctacctgggaagcaaccgcgcctcgggtgtc |
| | | ccggaccgcttctccggctcggggtctggcactgacttcacactgaagatctccagggtggaggcc |
| | | gaggacgtgggagtgtattactgtatgcaagtgctgcagaccccgcctctgaccttcggcggtgga |
| | | actaaggtcgacatcaagcggggatcgcaccaccatcaccatcatcatcac |
| CAR22-27 | 361 | malpvtalllplalllhaarpqvqlqesgpglvkpsetlsltcsvsggsinsyywswirqapgkgl |
| soluble | | ewiaftshsgnvkynpsltgrvtiavdtsknqfylevtsvtaadtavyfcargldplfaydafeiw |
| scFV AA | | glgtmvtvssggggsggggsggggseivltqsplslpvtpgepasiscrssqsllhsngynyldwy |
| | | lqkpgqspqlliylgsnrasgvpdrfsgsgsgtdftlkisrveaedvgvyycmqvlqtppltfggg |
| | | tkvdikrgshhhhhhhh |
| CAR22-27 | 362 | malpvtalllplalllhaarpqvqlqesgpglvkpsetlsltcsvsggsinsyywswirqapgkgl |
| Full AA | | ewiaftshsgnvkynpsltgrvtiavdtsknqfylevtsvtaadtavyfcargldplfaydafeiw |
| | | glgtmvtvssggggsggggsggggseivltqsplslpvtpgepasiscrssqsllhsngynyldwy |
| | | lqkpgqspqlliylgsnrasgvpdrfsgsgsgtdftlkisrveaedvgvyycmqvlqtppltfggg |
| | | tkvdikrtttpaprpptpaptiasqplslrpeacrpaaggavhtrgldfacdiyiwaplagtcgvl |
| | | llslvitlyckrgrkkllyifkqpfmrpvqttqeedgcscrfpeeeeggcelrvkfsrsadapayk |
| | | qgqnqlynelnlgrreeydvldkrrgrdpemggkprrknpqeglynelqkdkmaeayseigmkger |
| | | rrgkghdglyqglstatkdtydalhmqalppr |
| CAR22-27 | 363 | atggccctccctgtcaccgccctgctgcttccgctggctcttctgctccacgccgctcggccccaa |
| Full NT | | gtgcaacttcaggaatcaggccccggacttgtgaaaccatcagaaactctctccctcacttgctcc |
| | | gtgagcggggggtccatcaactcctactactggtcgtggattagacaggcccctggaaaggggctg |
| | | gagtggatcgcgttcacttcgcactccggcaacgtcaagtacaacccgtccctgaccggaagagtg |
| | | accattgccgtggatacctccaagaaccagttctacctggaagtcacgtcggtgaccgctgctgac |
| | | accgccgtgtacttctgcgcacgggggctggacccattgtttgcctacgatgcgttcgaaatctgg |
| | | gggctcggaaccatggtcactgtgtcctccggcggaggcggcagcggtggaggaggcagcggagga |
| | | ggaggttccgagatcgtgctgacccagagccccctgtccctccccgtgacccctggagaaccggcc |
| | | agcatttcctgccggtcgagccagtccctgttgcattcaaatggctacaactacctggattggtat |
| | | ctgcagaagcccggccagtcaccgcaactgctcatctacctgggaagcaaccgcgcctcgggtgtc |
| | | ccggaccgcttctccggctcggggtctggcactgacttcacactgaagatctccagggtggaggcc |
| | | gaggacgtgggagtgtattactgtatgcaagtgctgcagaccccgcctctgaccttcggcggtgga |
| | | actaaggtcgacatcaagcggaccactaccccagcaccgaggccacccaccccggctcctaccatc |
| | | gcctcccagcctctgtccctgcgtccggaggcatgtagacccgcagctggtggggccgtgcatacc |
| | | cggggtcttgacttcgcctgcgatatctacatttgggcccctctggctggtacttgcggggtcctg |
| | | ctgctttcactcgtgatcactctttactgtaagcgcggtcggaagaagctgctgtacatctttaag |
| | | caacccttcatgaggcctgtgcagactactcaagaggaggacggctgttcatgccggttcccagag |
| | | gaggaggaaggcggctgcgaactgcgcgtgaaattcagccgcagcgcagatgctccagcctacaag |
| | | caggggcagaaccagctctacaacgaactcaatcttggtcggagagaggagtacgacgtgctggac |
| | | aagcggagaggacgggacccagaaatgggcgggaagccgcgcagaaagaatccccaagagggcctg |
| | | tacaacgagctccaaaaggataagatggcagaagcctatagcgagattggtatgaaaggggaacgc |
| | | agaagaggcaaaggccacgacggactgtaccagggactcagcaccgccaccaaggacacctatgac |
| | | gctcttcacatgcaggccctgccgcctcgg |
| CAR22-28 | 364 | evqlvesggglvkpggslrlscaasgftfsdyymswirqapgkglewvsyisssgstiyyadsvkg |
| scFv AA | | rftisrdnaknslylqmnslraedtavyycarddfwsgsvdywgqgtlvtvssggggsggggsggg |
| | | gsggggssyvltqppsvsvapgktatitcggtnigsknvhwyqqkpgqapvlaiyydsdrpsgipe |
| | | rfsgsnsgntatltisrveagdeadyfcqvwdsssdhwvfgggtkltvl |
| CAR22-28 | 365 | gaagtgcagttggtggaatctggtggtggactcgtgaaacctggaggaagcttgcgcctgtcttgc |
| scFv NT | | gcggcctccggcttcactttctcggattactacatgtcctggattagacaggctccggggaaggga |
| | | ctcgaatgggtgtcctacatttcatcaagcggcagcaccatctactatgcggactccgtgaagggg |
| | | cggttcactatttcccgggataacgcaaagaacagcctgtaccttcaaatgaattcactgcgcgcc |
| | | gaggacaccgccgtgtactattgcgcccgggatgacttctggtcggggtccgtggactactggggc |
| | | caggggaccctggtcaccgtgtcctcgggaggaggaggaagcgggggaggcggttccgggggcggc |
| | | ggctcgggcggcggtggctccagctacgtgctcacccagccgccctccgtgtccgtggccccggga |
| | | aagaccgccaccatcacctgtggaggaacgaacatcggctccaagaacgtccattggtaccagcag |
| | | aagcccggacaggcccccgtgctggcaatctactacgactccgaccgcccaagcggtatccctgaa |
| | | aggttctccggctccaacagcggaaacactgcgactctgaccatctcaagagtggaggctggcgat |
| | | gaggccgactacttctgccaagtctgggactcgtcctcggaccactgggtgtttgggggaggcacc |
| | | aagctgactgtcctg |
| CAR22-28 | 366 | atggccctccctgtcaccgccctgctgcttccgctggctcttctgctccacgccgctcggcccgaa |
| soluble | | gtgcagttggtggaatctggtggtggactcgtgaaacctggaggaagcttgcgcctgtcttgcgcg |
| scFV NT | | gcctccggcttcactttctcggattactacatgtcctggattagacaggctccggggaagggactc |
| | | gaatgggtgtcctacatttcatcaagcggcagcaccatctactatgcggactccgtgaaggggcgg |
| | | ttcactatttcccgggataacgcaaagaacagcctgtaccttcaaatgaattcactgcgcgccgag |
| | | gacaccgccgtgtactattgcgcccgggatgacttctggtcggggtccgtggactactggggccag |
| | | gggaccctggtcaccgtgtcctcgggaggaggaggaagcgggggaggcggttccgggggcggcggc |
| | | tcgggcggcggtggctccagctacgtgctcacccagccgccctccgtgtccgtggccccgggaaag |
| | | accgccaccatcacctgtggaggaacgaacatcggctccaagaacgtccattggtaccagcagaag |
| | | cccggacaggcccccgtgctggcaatctactacgactccgaccgcccaagcggtatccctgaaagg |
| | | ttctccggctccaacagcggaaacactgcgactctgaccatctcaagagtggaggctggcgatgag |
| | | gccgactacttctgccaagtctgggactcgtcctcggaccactgggtgtttgggggaggcaccaag |
| | | ctgactgtcctgggatcgcaccaccatcaccatcatcatcac |
| CAR22-28 | 367 | malpvtalllplalllhaarpevqlvesggglvkpggslrlscaasgftfsdyymswirqapgkgl |
| soluble | | ewvsyisssgstiyyadsvkgrftisrdnaknslylqmnslraedtavyycarddfwsgsvdywgq |
| scFV NT | | gtlvtvssggggsggggsggggsggggssyvltqppsvsvapgktatitcggtnigsknvhwyqqk |
| | | pgqapvlaiyydsdrpsgiperfsgsnsgntatltisrveagdeadyfcqvwdsssdhwvfgggtk |
| | | ltvlgshhhhhhhh |
| CAR22-28 | 368 | malpvtalllplalllhaarpevqlvesggglvkpggslrlscaasgftfsdyymswirqapgkgl |
| Full AA | | ewvsyisssgstiyyadsvkgrftisrdnaknslylqmnslraedtavyycarddfwsgsvdywgq |
| | | gtlvtvssggggsggggsggggsggggssyvltqppsvsvapgktatitcggtnigsknvhwyqqk |
| | | pgqapvlaiyydsdrpsgiperfsgsnsgntatltisrveagdeadyfcqvwdsssdhwvfgggtk |
| | | ltvltttpaprpptpaptiasqplslrpeacrpaaggavhtrgldfacdiyiwaplagtcgvllls |
| | | lvitlyckrgrkkllyifkqpfmrpvqttqeedgcscrfpeeeeggcelrvkfsrsadapaykqgq |
| | | nqlynelnlgrreeydvldkrrgrdpemggkprrknpqeglynelqkdkmaeayseigmkgerrrg |
| | | kghdglyqglstatkdtydalhmqalppr |
| CAR22-28 | 369 | atggccctccctgtcaccgccctgctgcttccgctggctcttctgctccacgccgctcggcccgaa |
| Full NT | | gtgcagttggtggaatctggtggtggactcgtgaaacctggaggaagcttgcgcctgtcttgcgcg |
| | | gcctccggcttcactttctcggattactacatgtcctggattagacaggctccggggaagggactc |
| | | gaatgggtgtcctacatttcatcaagcggcagcaccatctactatgcggactccgtgaaggggcgg |
| | | ttcactatttcccgggataacgcaaagaacagcctgtaccttcaaatgaattcactgcgcgccgag |
| | | gacaccgccgtgtactattgcgcccgggatgacttctggtcggggtccgtggactactggggccag |
| | | gggaccctggtcaccgtgtcctcgggaggaggaggaagcgggggaggcggttccgggggcggcggc |
| | | tcgggcggcggtggctccagctacgtgctcacccagccgccctccgtgtccgtggccccgggaaag |
| | | accgccaccatcacctgtggaggaacgaacatcggctccaagaacgtccattggtaccagcagaag |
| | | cccggacaggcccccgtgctggcaatctactacgactccgaccgcccaagcggtatccctgaaagg |
| | | ttctccggctccaacagcggaaacactgcgactctgaccatctcaagagtggaggctggcgatgag |
| | | gccgactacttctgccaagtctgggactcgtcctcggaccactgggtgtttgggggaggcaccaag |
| | | ctgactgtcctgaccactaccccagcaccgaggccacccaccccggctcctaccatcgcctcccag |
| | | cctctgtccctgcgtccggaggcatgtagacccgcagctggtggggccgtgcatacccggggtctt |
| | | gacttcgcctgcgatatctacatttgggcccctctggctggtacttgcggggtcctgctgctttca |
| | | ctcgtgatcactctttactgtaagcgcggtcggaagaagctgctgtacatctttaagcaacccttc |
| | | atgaggcctgtgcagactactcaagaggaggacggctgttcatgccggttcccagaggaggaggaa |
| | | ggcggctgcgaactgcgcgtgaaattcagccgcagcgcagatgctccagcctacaagcaggggcag |
| | | aaccagctctacaacgaactcaatcttggtcggagagaggagtacgacgtgctggacaagcggaga |
| | | ggacgggacccagaaatgggcgggaagccgcgcagaaagaatccccaagagggcctgtacaacgag |
| | | ctccaaaaggataagatggcagaagcctatagcgagattggtatgaaaggggaacgcagaagaggc |
| | | aaaggccacgacggactgtaccagggactcagcaccgccaccaaggacacctatgacgctcttcac |
| | | atgcaggccctgccgcctcgg |
| CAR22-29 | 370 | qvqlvqsgaevkkpgasvkvsckasgytftsyymhwvrqapgqglewmgiinpsggstsyaqkfqg |
| scFv AA | | rvtmtrdtststvymelsslrsedtavyycareddssgytspfdywgqgtlvtvssggggsggggs |
| | | ggggsgggrssyeltqppsvsvapgetasiacgghnirsknvhwyqqkpgqapvlvisydgdrpsg |
| | | iperfsgsnlgstatltisrveagdeadyycqvwdsdsdhyvfgtgtkvtvl |
| CAR22-29 | 371 | caagtccaactcgtccagtccggtgcagaagtcaagaaacccggagcttccgtgaaagtgtcctgc |
| scFv NT | | aaggcctcggggtacacattcacctcctactacatgcactgggtgcgccaggccccgggccaggga |
| | | ctggaatggatgggaatcattaacccgtccggcggatcgaccagctacgcccagaagtttcaggga |
| | | cgcgtgaccatgacccgggacactagcaccagcactgtgtacatggaactgagctcactgcggtcc |
| | | gaggacactgcggtgtactattgcgcccgggaggacgattcctccgggtacacttcgcccttcgac |
| | | tattggggacagggaaccttggtcaccgtgtcatcgggtggtggaggaagcggaggaggcggctcc |
| | | ggcggcgggggttcaggcggtggcagaagctcctacgaactgacccagcctccgtccgtgtccgtg |
| | | gcccccggcgaaaccgcctcgatcgcgtgtggagggcacaatattcggagcaagaacgtgcattgg |
| | | taccagcagaagccgggacaggcaccagtgctcgtgatctcctacgatggggacaggccttctggc |
| | | atccctgagagattcagcgggtccaacctgggctccactgctaccctgaccatctcgcgcgtggaa |
| | | gccggggatgaggccgactactactgccaagtctgggactccgacagcgatcactacgtgttcgga |
| | | actggaaccaaggtcacggtgctt |
| CAR22-29 | 372 | atggccctccctgtcaccgccctgctgcttccgctggctcttctgctccacgccgctcggccccaa |
| Soluble scFv- | | gtccaactcgtccagtccggtgcagaagtcaagaaacccggagcttccgtgaaagtgtcctgcaag |
| nt | | gcctcggggtacacattcacctcctactacatgcactgggtgcgccaggccccgggccagggactg |
| | | gaatggatgggaatcattaacccgtccggcggatcgaccagctacgcccagaagtttcagggacgc |
| | | gtgaccatgacccgggacactagcaccagcactgtgtacatggaactgagctcactgcggtccgag |
| | | gacactgcggtgtactattgcgcccgggaggacgattcctccgggtacacttcgcccttcgactat |
| | | tggggacagggaaccttggtcaccgtgtcatcgggtggtggaggaagcggaggaggcggctccggc |
| | | ggcgggggttcaggcggtggcagaagctcctacgaactgacccagcctccgtccgtgtccgtggcc |
| | | cccggcgaaaccgcctcgatcgcgtgtggagggcacaatattcggagcaagaacgtgcattggtac |
| | | cagcagaagccgggacaggcaccagtgctcgtgatctcctacgatggggacaggccttctggcatc |
| | | cctgagagattcagcgggtccaacctgggctccactgctaccctgaccatctcgcgcgtggaagcc |
| | | ggggatgaggccgactactactgccaagtctgggactccgacagcgatcactacgtgttcggaact |
| | | ggaaccaaggtcacggtgcttggatcgcaccaccatcaccatcatcatcac |
| CAR22-29 | 373 | malpvtalllplalllhaarpqvqlvqsgaevkkpgasvkvsckasgytftsyymhwvrqapgqgl |
| soluble scFv | | ewmgiinpsggstsyaqkfqgrvtmtrdtststvymelsslrsedtavyycareddssgytspfdy |
| AA | | wgqgtlvtvssggggsggggsggggsgggrssyeltqppsvsvapgetasiacgghnirsknvhwy |
| | | qqkpgqapvlvisydgdrpsgiperfsgsnlgstatltisrveagdeadyycqvwdsdsdhyvfgt |
| | | gtkvtvlgshhhhhhhh |
| CAR22-29 | 374 | malpvtalllplalllhaarpqvqlvqsgaevkkpgasvkvsckasgytftsyymhwvrqapgqgl |
| Full AA | | ewmgiinpsggstsyaqkfqgrvtmtrdtststvymelsslrsedtavyycareddssgytspfdy |
| | | wgqgtlvtvssggggsggggsggggsgggrssyeltqppsvsvapgetasiacgghnirsknvhwy |
| | | qqkpgqapvlvisydgdrpsgiperfsgsnlgstatltisrveagdeadyycqvwdsdsdhyvfgt |
| | | gtkvtvltttpaprpptpaptiasqplslrpeacrpaaggavhtrgldfacdiyiwaplagtcgvl |
| | | llslvitlyckrgrkkllyifkqpfmrpvqttqeedgcscrfpeeeeggcelrvkfsrsadapayk |
| | | qgqnqlynelnlgrreeydvldkrrgrdpemggkprrknpqeglynelqkdkmaeayseigmkger |
| | | rrgkghdglyqglstatkdtydalhmqalppr |
| CAR22-29 | 375 | atggccctccctgtcaccgccctgctgcttccgctggctcttctgctccacgccgctcggccccaa |
| Full NT | | gtccaactcgtccagtccggtgcagaagtcaagaaacccggagcttccgtgaaagtgtcctgcaag |
| | | gcctcggggtacacattcacctcctactacatgcactgggtgcgccaggccccgggccagggactg |
| | | gaatggatgggaatcattaacccgtccggcggatcgaccagctacgcccagaagtttcagggacgc |
| | | gtgaccatgacccgggacactagcaccagcactgtgtacatggaactgagctcactgcggtccgag |
| | | gacactgcggtgtactattgcgcccgggaggacgattcctccgggtacacttcgcccttcgactat |
| | | tggggacagggaaccttggtcaccgtgtcatcgggtggtggaggaagcggaggaggcggctccggc |
| | | ggcgggggttcaggcggtggcagaagctcctacgaactgacccagcctccgtccgtgtccgtggcc |
| | | cccggcgaaaccgcctcgatcgcgtgtggagggcacaatattcggagcaagaacgtgcattggtac |
| | | cagcagaagccgggacaggcaccagtgctcgtgatctcctacgatggggacaggccttctggcatc |
| | | cctgagagattcagcgggtccaacctgggctccactgctaccctgaccatctcgcgcgtggaagcc |
| | | ggggatgaggccgactactactgccaagtctgggactccgacagcgatcactacgtgttcggaact |
| | | ggaaccaaggtcacggtgcttaccactaccccagcaccgaggccacccaccccggctcctaccatc |
| | | gcctcccagcctctgtccctgcgtccggaggcatgtagacccgcagctggtggggccgtgcatacc |
| | | cggggtcttgacttcgcctgcgatatctacatttgggcccctctggctggtacttgcggggtcctg |
| | | ctgctttcactcgtgatcactctttactgtaagcgcggtcggaagaagctgctgtacatctttaag |
| | | caacccttcatgaggcctgtgcagactactcaagaggaggacggctgttcatgccggttcccagag |
| | | gaggaggaaggcggctgcgaactgcgcgtgaaattcagccgcagcgcagatgctccagcctacaag |
| | | caggggcagaaccagctctacaacgaactcaatcttggtcggagagaggagtacgacgtgctggac |
| | | aagcggagaggacgggacccagaaatgggcgggaagccgcgcagaaagaatccccaagagggcctg |
| | | tacaacgagctccaaaaggataagatggcagaagcctatagcgagattggtatgaaaggggaacgc |
| | | agaagaggcaaaggccacgacggactgtaccagggactcagcaccgccaccaaggacacctatgac |
| | | gctcttcacatgcaggccctgccgcctcgg |
| CAR22-30 | 376 | evqlvesgaevkkpgasvkvsckasgytftgyymhwvrqapgqglewmgwinpnsggtnyaqkfqg |
| scFv AA | | rvtmtrdtsistaymelsrlrsddtavyycarepassswygyyyymdvwgkgtlvtvssggggsgg |
| | | ggsggggsggggsdiqmtqspsslsasvgdrvtitcrasqsintylnwyqqkpgkppklliyaasn |
| | | lqsgvpsrfsgsgsgthftltisslqpddfatyycqqsysslltfgggtkleik |
| CAR22-30 | 377 | gaagtgcagttggtggaatcaggagcagaagtcaagaaacccggagcatcagtcaaagtgtcctgc |
| scFv NT | | aaggcctccgggtacactttcactggttactacatgcattgggtgcgccaggcgcccggacaagga |
| | | ctcgagtggatgggctggattaaccccaactccggcggaaccaactacgcccagaagttccagggt |
| | | agagtgacgatgactcgggacaccagcatctccaccgcgtacatggagctgtcgagactgaggtcc |
| | | gacgataccgccgtgtactactgcgcccgggaaccggcttcctcgtcttggtacggatattactat |
| | | tacatggatgtctggggaaagggaacacttgtcactgtgtccagcggtggcggaggcagcggcggt |
| | | ggagggtccggcggcggcggatcgggagggggaggcagcgacatccagatgactcagtccccatcc |
| | | tcgctgtcggctagcgtgggcgaccgcgtgaccattacctgtcgggccagccaatccatcaacacc |
| | | tacctgaactggtaccagcagaagccggggaagcctccaaagctgctcatctacgcggcctcaaat |
| | | ctgcaatccggggtgccttcccggttctccggttccggttcggggacccacttcactctgaccatt |
| | | agctcactgcaaccggacgactttgccacctactactgccagcagagctactcctccctcctgacc |
| | | ttcggcggaggaaccaagctcgagatcaag |
| CAR22-30 | 378 | atggccctccctgtcaccgccctgctgcttccgctggctcttctgctccacgccgctcggcccgaa |
| soluble scFv | | gtgcagttggtggaatcaggagcagaagtcaagaaacccggagcatcagtcaaagtgtcctgcaag |
| NT | | gcctccgggtacactttcactggttactacatgcattgggtgcgccaggcgcccggacaaggactc |
| | | gagtggatgggctggattaaccccaactccggcggaaccaactacgcccagaagttccagggtaga |
| | | gtgacgatgactcgggacaccagcatctccaccgcgtacatggagctgtcgagactgaggtccgac |
| | | gataccgccgtgtactactgcgcccgggaaccggcttcctcgtcttggtacggatattactattac |
| | | atggatgtctggggaaagggaacacttgtcactgtgtccagcggtggcggaggcagcggcggtgga |
| | | gggtccggcggcggcggatcgggagggggaggcagcgacatccagatgactcagtccccatcctcg |
| | | ctgtcggctagcgtgggcgaccgcgtgaccattacctgtcgggccagccaatccatcaacacctac |
| | | ctgaactggtaccagcagaagccggggaagcctccaaagctgctcatctacgcggcctcaaatctg |
| | | caatccggggtgccttcccggttctccggttccggttcggggacccacttcactctgaccattagc |
| | | tcactgcaaccggacgactttgccacctactactgccagcagagctactcctccctcctgaccttc |
| | | ggcggaggaaccaagctcgagatcaagggatcgcaccaccatcaccatcatcatcac |
| CAR22-30 | 379 | malpvtalllplalllhaarpevqlvesgaevkkpgasvkvsckasgytftgyymhwvrqapgqgl |
| soluble scFv | | ewmgwinpnsggtnyaqkfqgrvtmtrdtsistaymelsrlrsddtavyycarepassswygyyyy |
| AA | | mdvwgkgtlvtvssggggsggggsggggsggggsdiqmtqspsslsasvgdrvtitcrasqsinty |
| | | lnwyqqkpgkppklliyaasnlqsgvpsrfsgsgsgthftltisslqpddfatyycqqsysslltf |
| | | gggtkleikgshhhhhhhh |
| CAR22-30 | 380 | malpvtalllplalllhaarpevqlvesgaevkkpgasvkvsckasgytftgyymhwvrqapgqgl |
| Full AA | | ewmgwinpnsggtnyaqkfqgrvtmtrdtsistaymelsrlrsddtavyycarepassswygyyyy |
| | | mdvwgkgtlvtvssggggsggggsggggsggggsdiqmtqspsslsasvgdrvtitcrasqsinty |
| | | lnwyqqkpgkppklliyaasnlqsgvpsrfsgsgsgthftltisslqpddfatyycqqsysslltf |
| | | gggtkleiktttpaprpptpaptiasqplslrpeacrpaaggavhtrgldfacdiyiwaplagtcg |
| | | vlllslvitlyckrgrkkllyifkqpfmrpvqttqeedgcscrfpeeeeggcelrvkfsrsadapa |
| | | ykqgqnqlynelnlgrreeydvldkrrgrdpemggkprrknpqeglynelqkdkmaeayseigmkg |
| | | errrgkghdglyqglstatkdtydalhmqalppr |
| CAR22-30 | 381 | atggccctccctgtcaccgccctgctgcttccgctggctcttctgctccacgccgctcggcccgaa |
| Full NT | | gtgcagttggtggaatcaggagcagaagtcaagaaacccggagcatcagtcaaagtgtcctgcaag |
| | | gcctccgggtacactttcactggttactacatgcattgggtgcgccaggcgcccggacaaggactc |
| | | gagtggatgggctggattaaccccaactccggcggaaccaactacgcccagaagttccagggtaga |
| | | gtgacgatgactcgggacaccagcatctccaccgcgtacatggagctgtcgagactgaggtccgac |
| | | gataccgccgtgtactactgcgcccgggaaccggcttcctcgtcttggtacggatattactattac |
| | | atggatgtctggggaaagggaacacttgtcactgtgtccagcggtggcggaggcagcggcggtgga |
| | | gggtccggcggcggcggatcgggagggggaggcagcgacatccagatgactcagtccccatcctcg |
| | | ctgtcggctagcgtgggcgaccgcgtgaccattacctgtcgggccagccaatccatcaacacctac |
| | | ctgaactggtaccagcagaagccggggaagcctccaaagctgctcatctacgcggcctcaaatctg |
| | | caatccggggtgccttcccggttctccggttccggttcggggacccacttcactctgaccattagc |
| | | tcactgcaaccggacgactttgccacctactactgccagcagagctactcctccctcctgaccttc |
| | | ggcggaggaaccaagctcgagatcaagaccactaccccagcaccgaggccacccaccccggctcct |
| | | accatcgcctcccagcctctgtccctgcgtccggaggcatgtagacccgcagctggtggggccgtg |
| | | catacccggggtcttgacttcgcctgcgatatctacatttgggcccctctggctggtacttgcggg |
| | | gtcctgctgctttcactcgtgatcactctttactgtaagcgcggtcggaagaagctgctgtacatc |
| | | tttaagcaacccttcatgaggcctgtgcagactactcaagaggaggacggctgttcatgccggttc |
| | | ccagaggaggaggaaggcggctgcgaactgcgcgtgaaattcagccgcagcgcagatgctccagcc |
| | | tacaagcaggggcagaaccagctctacaacgaactcaatcttggtcggagagaggagtacgacgtg |
| | | ctggacaagcggagaggacgggacccagaaatgggcgggaagccgcgcagaaagaatccccaagag |
| | | ggcctgtacaacgagctccaaaaggataagatggcagaagcctatagcgagattggtatgaaaggg |
| | | gaacgcagaagaggcaaaggccacgacggactgtaccagggactcagcaccgccaccaaggacacc |
| | | tatgacgctcttcacatgcaggccctgccgcctcgg |
| CAR22-31 | 382 | Qvqlvqsgaevkkpgasvkvsckasgytftsydinwvrqatgqglewmgwmnpnsgntgyaqkfqg |
| scFv AA | | rvtmtrntsistaymelsslrsedtavyycargdsnywsyygmdvwgqgtlvtvssggggsggggs |
| | | ggggsggggsqsvltqprsvsgspgqsvtisctgtssdvggynyvswyqqhpgeapkliiydadkr |
| | | psgisnrfssgksgntasltisglqvedeadyyccsyaggstwvfgggtkvtvl |
| CAR22-31 | 383 | Caagtccaactcgtccagtccggtgcagaagtcaagaaacccggagcttccgtgaaagtgtcctgc |
| scFv NT | | aaggcctcgggttacaccttcacctcctacgacattaactgggtgcgccaggccactgggcaggga |
| | | ctggaatggatgggctggatgaaccctaactcgggcaacaccggctatgcccagaagtttcaggga |
| | | cgcgtgacgatgacccggaatacctccatctcaaccgcctacatggaactgagcagcctgaggtcc |
| | | gaggatactgcagtgtactactgcgctcggggagactccaactattggtcctactacggaatggac |
| | | gtgtggggccagggaaccctcgtcactgtgtcgagcgggggaggcggttcagggggcggcggaagc |
| | | ggaggcggagggtccggcggaggaggttctcagagcgtgctgactcaaccgagatccgtgtccggg |
| | | agcccgggccagtcagtgactatctcgtgcaccgggaccagctccgacgtgggagggtacaactac |
| | | gtgtcgtggtaccagcagcaccccggagaggcgccaaagttgattatctacgacgccgataagcgc |
| | | ccttcgggaatctccaaccggttctcctccgggaagtccggcaacactgcctccctgaccatcagc |
| | | ggacttcaagtggaggacgaagcggattactactgctgttcatacgccggcggatcgacctgggtg |
| | | ttcggcggtggtaccaaggtcacagtgctg |
| CAR22-31 | 384 | atggccctccctgtcaccgccctgctgcttccgctggctcttctgctccacgccgctcggccccaa |
| soluble scFv | | gtccaactcgtccagtccggtgcagaagtcaagaaacccggagcttccgtgaaagtgtcctgcaag |
| NT | | gcctcgggttacaccttcacctcctacgacattaactgggtgcgccaggccactgggcagggactg |
| | | gaatggatgggctggatgaaccctaactcgggcaacaccggctatgcccagaagtttcagggacgc |
| | | gtgacgatgacccggaatacctccatctcaaccgcctacatggaactgagcagcctgaggtccgag |
| | | gatactgcagtgtactactgcgctcggggagactccaactattggtcctactacggaatggacgtg |
| | | tggggccagggaaccctcgtcactgtgtcgagcgggggaggcggttcagggggcggcggaagcgga |
| | | ggcggagggtccggcggaggaggttctcagagcgtgctgactcaaccgagatccgtgtccgggagc |
| | | ccgggccagtcagtgactatctcgtgcaccgggaccagctccgacgtgggagggtacaactacgtg |
| | | tcgtggtaccagcagcaccccggagaggcgccaaagttgattatctacgacgccgataagcgccct |
| | | tcgggaatctccaaccggttctcctccgggaagtccggcaacactgcctccctgaccatcagcgga |
| | | cttcaagtggaggacgaagcggattactactgctgttcatacgccggcggatcgacctgggtgttc |
| | | ggcggtggtaccaaggtcacagtgctgggatcgcaccaccatcaccatcatcatcac |
| CAR22-31 | 385 | malpvtalllplalllhaarpqvqlvqsgaevkkpgasvkvsckasgytftsydinwvrqatgqgl |
| soluble scFv | | ewmgwmnpnsgntgyaqkfqgrvtmtrntsistaymelsslrsedtavyycargdsnywsyygmdv |
| AA | | wgqgtlvtvssggggsggggsggggsggggsqsvltqprsvsgspgqsvtisctgtssdvggynyv |
| | | swyqqhpgeapkliiydadkrpsgisnrfssgksgntasltisglqvedeadyyccsyaggstwvf |
| | | gggtkvtvlgshhhhhhhh |
| CAR22-31 | 386 | malpvtalllplalllhaarpqvqlvqsgaevkkpgasvkvsckasgytftsydinwvrqatgqgl |
| Full AA | | ewmgwmnpnsgntgyaqkfqgrvtmtrntsistaymelsslrsedtavyycargdsnywsyygmdv |
| | | wgqgtlvtvssggggsggggsggggsggggsqsvltqprsvsgspgqsvtisctgtssdvggynyv |
| | | swyqqhpgeapkliiydadkrpsgisnrfssgksgntasltisglqvedeadyyccsyaggstwvf |
| | | gggtkvtvltttpaprpptpaptiasqplslrpeacrpaaggavhtrgldfacdiyiwaplagtcg |
| | | vlllslvitlyckrgrkkllyifkqpfmrpvqttqeedgcscrfpeeeeggcelrvkfsrsadapa |
| | | ykqgqnqlynelnlgrreeydvldkrrgrdpemggkprrknpqeglynelqkdkmaeayseigmkg |
| | | errrgkghdglyqglstatkdtydalhmqalppr |
| CAR22-31 | 387 | atggccctccctgtcaccgccctgctgcttccgctggctcttctgctccacgccgctcggccccaa |
| Full NT | | gtccaactcgtccagtccggtgcagaagtcaagaaacccggagcttccgtgaaagtgtcctgcaag |
| | | gcctcgggttacaccttcacctcctacgacattaactgggtgcgccaggccactgggcagggactg |
| | | gaatggatgggctggatgaaccctaactcgggcaacaccggctatgcccagaagtttcagggacgc |
| | | gtgacgatgacccggaatacctccatctcaaccgcctacatggaactgagcagcctgaggtccgag |
| | | gatactgcagtgtactactgcgctcggggagactccaactattggtcctactacggaatggacgtg |
| | | tggggccagggaaccctcgtcactgtgtcgagcgggggaggcggttcagggggcggcggaagcgga |
| | | ggcggagggtccggcggaggaggttctcagagcgtgctgactcaaccgagatccgtgtccgggagc |
| | | ccgggccagtcagtgactatctcgtgcaccgggaccagctccgacgtgggagggtacaactacgtg |
| | | tcgtggtaccagcagcaccccggagaggcgccaaagttgattatctacgacgccgataagcgccct |
| | | tcgggaatctccaaccggttctcctccgggaagtccggcaacactgcctccctgaccatcagcgga |
| | | cttcaagtggaggacgaagcggattactactgctgttcatacgccggcggatcgacctgggtgttc |
| | | ggcggtggtaccaaggtcacagtgctgaccactaccccagcaccgaggccacccaccccggctcct |
| | | accatcgcctcccagcctctgtccctgcgtccggaggcatgtagacccgcagctggtggggccgtg |
| | | catacccggggtcttgacttcgcctgcgatatctacatttgggcccctctggctggtacttgcggg |
| | | gtcctgctgctttcactcgtgatcactctttactgtaagcgcggtcggaagaagctgctgtacatc |
| | | tttaagcaacccttcatgaggcctgtgcagactactcaagaggaggacggctgttcatgccggttc |
| | | ccagaggaggaggaaggcggctgcgaactgcgcgtgaaattcagccgcagcgcagatgctccagcc |
| | | tacaagcaggggcagaaccagctctacaacgaactcaatcttggtcggagagaggagtacgacgtg |
| | | ctggacaagcggagaggacgggacccagaaatgggcgggaagccgcgcagaaagaatccccaagag |
| | | ggcctgtacaacgagctccaaaaggataagatggcagaagcctatagcgagattggtatgaaaggg |
| | | gaacgcagaagaggcaaaggccacgacggactgtaccagggactcagcaccgccaccaaggacacc |
| | | tatgacgctcttcacatgcaggccctgccgcctcgg |
| CAR22-32 | 388 | qvqlvqsgaevkkpgasvkvsckasgytftsygiswvrqapgqglewmgwisayngntnyaqklqg |
| scFv AA | | rvtmttdtststaymelrslrsddtavyycasfsssdsydywgqgtlvtvssggggsggggsgggg |
| | | sggggseivltqspatlsvspgeratlscrasqsvtsnlawyqqkpgqaprlliyaastratgipa |
| | | rfsgsgsgteftltissmqsedfavyfcqqyhtwppltfgggtkveikt |
| CAR22-32 | 389 | caagtccaactcgtccagtccggtgcagaagtcaagaaaccaggagcttcagtgaaagtgtcgtgc |
| scFv NT | | aaggcctccgggtataccttcacttcctacggcattagctgggtgcggcaggcccccggccaaggg |
| | | ctggagtggatgggctggatcagcgcctacaacggaaacaccaactacgcccagaagctgcaggga |
| | | cgcgtgaccatgaccactgacacctccacttcgaccgcgtacatggagctcagatcactgcgctcc |
| | | gacgataccgccgtgtactactgcgcctccttctcctcctccgactcctacgactactggggacag |
| | | gggactctggtcactgtgtcgtccggcggcggcggaagcggtggcggaggcagcggtggaggcggt |
| | | tcgggaggaggagggtccgaaatcgtgctgacccagtcccccgctaccctttccgtgagcccgggg |
| | | gaacgggccaccctgtcttgccgcgcgtcacaaagcgtgacttcgaacctggcctggtaccagcag |
| | | aagccggggcaggccccgagattgctcatctatgccgcgagcaccagggcaaccggaattcctgcc |
| | | cggttttccggttccgggtcgggcactgagttcaccctgacaatcagctcaatgcagtccgaggat |
| | | ttcgctgtgtacttctgtcaacagtaccacacctggcctcccctgacgttcggaggcggaaccaag |
| | | gtcgaaatcaagacc |
| CAR22-32 | 390 | atggccctccctgtcaccgccctgctgcttccgctggctcttctgctccacgccgctcggccccaa |
| soluble scFv | | gtccaactcgtccagtccggtgcagaagtcaagaaaccaggagcttcagtgaaagtgtcgtgcaag |
| NT | | gcctccgggtataccttcacttcctacggcattagctgggtgcggcaggcccccggccaagggctg |
| | | gagtggatgggctggatcagcgcctacaacggaaacaccaactacgcccagaagctgcagggacgc |
| | | gtgaccatgaccactgacacctccacttcgaccgcgtacatggagctcagatcactgcgctccgac |
| | | gataccgccgtgtactactgcgcctccttctcctcctccgactcctacgactactggggacagggg |
| | | actctggtcactgtgtcgtccggcggcggcggaagcggtggcggaggcagcggtggaggcggttcg |
| | | ggaggaggagggtccgaaatcgtgctgacccagtcccccgctaccctttccgtgagcccgggggaa |
| | | cgggccaccctgtcttgccgcgcgtcacaaagcgtgacttcgaacctggcctggtaccagcagaag |
| | | ccggggcaggccccgagattgctcatctatgccgcgagcaccagggcaaccggaattcctgcccgg |
| | | ttttccggttccgggtcgggcactgagttcaccctgacaatcagctcaatgcagtccgaggatttc |
| | | gctgtgtacttctgtcaacagtaccacacctggcctcccctgacgttcggaggcggaaccaaggtc |
| | | gaaatcaagaccggatcgcaccaccatcaccatcatcatcac |
| CAR22-32 | 391 | Malpvtalllplalllhaarpqvqlvqsgaevkkpgasvkvsckasgytftsygiswvrqapgqgl |
| soluble scFv | | ewmgwisayngntnyaqklqgrvtmttdtststaymelrslrsddtavyycasfsssdsydywgqg |
| AA | | tlvtvssggggsggggsggggsggggseivltqspatlsvspgeratlscrasqsvtsnlawyqqk |
| | | pgqaprlliyaastratgiparfsgsgsgteftltissmqsedfavyfcqqyhtwppltfgggtkv |
| | | eiktgshhhhhhhh |
| CAR22-32 | 392 | malpvtalllplalllhaarpqvqlvqsgaevkkpgasvkvsckasgytftsygiswvrqapgqgl |
| Full AA | | ewmgwisayngntnyaqklqgrvtmttdtststaymelrslrsddtavyycasfsssdsydywgqg |
| | | tlvtvssggggsggggsggggsggggseivltqspatlsvspgeratlscrasqsvtsnlawyqqk |
| | | pgqaprlliyaastratgiparfsgsgsgteftltissmqsedfavyfcqqyhtwppltfgggtkv |
| | | eiktttpaprpptpaptiasqplslrpeacrpaaggavhtrgldfacdiyiwaplagtcgvlllsl |
| | | vitlyckrgrkkllyifkqpfmrpvqttqeedgcscrfpeeeeggcelrvkfsrsadapaykqgqn |
| | | qlynelnlgrreeydvldkrrgrdpemggkprrknpqeglynelqkdkmaeayseigmkgerrrgk |
| | | ghdglyqglstatkdtydalhmqalppr |
| CAR22-32 | 393 | atggccctccctgtcaccgccctgctgcttccgctggctcttctgctccacgccgctcggccccaa |
| Full NT | | gtccaactcgtccagtccggtgcagaagtcaagaaaccaggagcttcagtgaaagtgtcgtgcaag |
| | | gcctccgggtataccttcacttcctacggcattagctgggtgcggcaggcccccggccaagggctg |
| | | gagtggatgggctggatcagcgcctacaacggaaacaccaactacgcccagaagctgcagggacgc |
| | | gtgaccatgaccactgacacctccacttcgaccgcgtacatggagctcagatcactgcgctccgac |
| | | gataccgccgtgtactactgcgcctccttctcctcctccgactcctacgactactggggacagggg |
| | | actctggtcactgtgtcgtccggcggcggcggaagcggtggcggaggcagcggtggaggcggttcg |
| | | ggaggaggagggtccgaaatcgtgctgacccagtcccccgctaccctttccgtgagcccgggggaa |
| | | cgggccaccctgtcttgccgcgcgtcacaaagcgtgacttcgaacctggcctggtaccagcagaag |
| | | ccggggcaggccccgagattgctcatctatgccgcgagcaccagggcaaccggaattcctgcccgg |
| | | ttttccggttccgggtcgggcactgagttcaccctgacaatcagctcaatgcagtccgaggatttc |
| | | gctgtgtacttctgtcaacagtaccacacctggcctcccctgacgttcggaggcggaaccaaggtc |
| | | gaaatcaagaccactaccccagcaccgaggccacccaccccggctcctaccatcgcctcccagcct |
| | | ctgtccctgcgtccggaggcatgtagacccgcagctggtggggccgtgcatacccggggtcttgac |
| | | ttcgcctgcgatatctacatttgggcccctctggctggtacttgcggggtcctgctgctttcactc |
| | | gtgatcactctttactgtaagcgcggtcggaagaagctgctgtacatctttaagcaacccttcatg |
| | | aggcctgtgcagactactcaagaggaggacggctgttcatgccggttcccagaggaggaggaaggc |
| | | ggctgcgaactgcgcgtgaaattcagccgcagcgcagatgctccagcctacaagcaggggcagaac |
| | | cagctctacaacgaactcaatcttggtcggagagaggagtacgacgtgctggacaagcggagagga |
| | | cgggacccagaaatgggcgggaagccgcgcagaaagaatccccaagagggcctgtacaacgagctc |
| | | caaaaggataagatggcagaagcctatagcgagattggtatgaaaggggaacgcagaagaggcaaa |
| | | ggccacgacggactgtaccagggactcagcaccgccaccaaggacacctatgacgctcttcacatg |
| | | caggccctgccgcctcgg |
| CAR22-33 | 394 | qvnlresgpalvkptqtltltctfsgfslntfgmsvswirqppgkalewlalidwdddkyystslr |
| scFv AA | | trltiskdtaknqvvlrmtnmdpmdtatyycariyggdrtntqapyffdlwgqgtlvtvssggggs |
| | | ggggsggggsdvvmtqsplslpvtpgepasiscrssqsllhsngynyldwylqkpgqspqlliylg |
| | | snrasgvpdrfsgsgsgtdftlkisrveaedvgvyycmqalqtpwtfgqgtkleik |
| CAR22-33 | 395 | caagtcaacctcagagaatcaggtcctgccctcgtcaaacctacccagaccctcaccttgacctgt |
| scFv NT | | accttctccgggttctcgctgaacaccttcgggatgtccgtgagctggattaggcagcccccggga |
| | | aaggccctggagtggctggccctgatcgattgggatgacgacaagtactactccacctcactccgc |
| | | actcgcctgaccatctcaaaggacactgccaagaaccaagtggtgctgcggatgactaacatggac |
| | | ccgatggacaccgccacctattactgcgcccggatctacggaggcgacagaaccaacactcaggcc |
| | | ccctacttcttcgatctgtggggacagggcactcttgtgaccgtgtcctcgggcggaggaggctcc |
| | | ggtggagggggatcaggaggaggcggcagcgacgtcgtgatgactcaatccccgctgtccttgcct |
| | | gtgacccctggcgaacccgcgtccattagctgccggagcagccagtccctcctgcactcgaacgga |
| | | tacaactacctggattggtatctgcagaagcccggccagtccccacaactcctgatctacctgggc |
| | | tctaatcgggcatccggggtcccggatcgcttcagcggttcgggctcgggtaccgacttcacgctg |
| | | aagatttccagggtggaagctgaggacgtgggagtgtactactgcatgcaggcgcttcagactcca |
| | | tggacatttggacaggggaccaagctggagatcaag |
| CAR22-33- | 396 | atggccctccctgtcaccgccctgctgcttccgctggctcttctgctccacgccgctcggccccaa |
| soluble scFv | | gtcaacctcagagaatcaggtcctgccctcgtcaaacctacccagaccctcaccttgacctgtacc |
| NT | | ttctccgggttctcgctgaacaccttcgggatgtccgtgagctggattaggcagcccccgggaaag |
| | | gccctggagtggctggccctgatcgattgggatgacgacaagtactactccacctcactccgcact |
| | | cgcctgaccatctcaaaggacactgccaagaaccaagtggtgctgcggatgactaacatggacccg |
| | | atggacaccgccacctattactgcgcccggatctacggaggcgacagaaccaacactcaggccccc |
| | | tacttcttcgatctgtggggacagggcactcttgtgaccgtgtcctcgggcggaggaggctccggt |
| | | ggagggggatcaggaggaggcggcagcgacgtcgtgatgactcaatccccgctgtccttgcctgtg |
| | | acccctggcgaacccgcgtccattagctgccggagcagccagtccctcctgcactcgaacggatac |
| | | aactacctggattggtatctgcagaagcccggccagtccccacaactcctgatctacctgggctct |
| | | aatcgggcatccggggtcccggatcgcttcagcggttcgggctcgggtaccgacttcacgctgaag |
| | | atttccagggtggaagctgaggacgtgggagtgtactactgcatgcaggcgcttcagactccatgg |
| | | acatttggacaggggaccaagctggagatcaagggatcgcaccaccatcaccatcatcatcac |
| CAR22-33 | 397 | malpvtalllplalllhaarpqvnlresgpalvkptqtltltctfsgfslntfgmsvswirqppgk |
| soluble scFv | | alewlalidwdddkyystslrtrltiskdtaknqvvlrmtnmdpmdtatyycariyggdrtntqap |
| AA | | yffdlwgqgtlvtvssggggsggggsggggsdvvmtqsplslpvtpgepasiscrssqsllhsngy |
| | | nyldwylqkpgqspqlliylgsnrasgvpdrfsgsgsgtdftlkisrveaedvgvyycmqalqtpw |
| | | tfgqgtkleikgshhhhhhhh |
| CAR22-33 | 398 | malpvtalllplalllhaarpqvnlresgpalvkptqtltltctfsgfslntfgmsvswirqppgk |
| Full AA | | alewlalidwdddkyystslrtrltiskdtaknqvvlrmtnmdpmdtatyycariyggdrtntqap |
| | | yffdlwgqgtlvtvssggggsggggsggggsdvvmtqsplslpvtpgepasiscrssqsllhsngy |
| | | nyldwylqkpgqspqlliylgsnrasgvpdrfsgsgsgtdftlkisrveaedvgvyycmqalqtpw |
| | | tfgqgtkleiktttpaprpptpaptiasqplslrpeacrpaaggavhtrgldfacdiyiwaplagt |
| | | cgvlllslvitlyckrgrkkllyifkqpfmrpvqttqeedgcscrfpeeeeggcelrvkfsrsada |
| | | paykqgqnqlynelnlgrreeydvldkrrgrdpemggkprrknpqeglynelqkdkmaeayseigm |
| | | kgerrrgkghdglyqglstatkdtydalhmqalppr |
| CAR22-33 | 399 | atggccctccctgtcaccgccctgctgcttccgctggctcttctgctccacgccgctcggccccaa |
| Full NT | | gtcaacctcagagaatcaggtcctgccctcgtcaaacctacccagaccctcaccttgacctgtacc |
| | | ttctccgggttctcgctgaacaccttcgggatgtccgtgagctggattaggcagcccccgggaaag |
| | | gccctggagtggctggccctgatcgattgggatgacgacaagtactactccacctcactccgcact |
| | | cgcctgaccatctcaaaggacactgccaagaaccaagtggtgctgcggatgactaacatggacccg |
| | | atggacaccgccacctattactgcgcccggatctacggaggcgacagaaccaacactcaggccccc |
| | | tacttcttcgatctgtggggacagggcactcttgtgaccgtgtcctcgggcggaggaggctccggt |
| | | ggagggggatcaggaggaggcggcagcgacgtcgtgatgactcaatccccgctgtccttgcctgtg |
| | | acccctggcgaacccgcgtccattagctgccggagcagccagtccctcctgcactcgaacggatac |
| | | aactacctggattggtatctgcagaagcccggccagtccccacaactcctgatctacctgggctct |
| | | aatcgggcatccggggtcccggatcgcttcagcggttcgggctcgggtaccgacttcacgctgaag |
| | | atttccagggtggaagctgaggacgtgggagtgtactactgcatgcaggcgcttcagactccatgg |
| | | acatttggacaggggaccaagctggagatcaagaccactaccccagcaccgaggccacccaccccg |
| | | gctcctaccatcgcctcccagcctctgtccctgcgtccggaggcatgtagacccgcagctggtggg |
| | | gccgtgcatacccggggtcttgacttcgcctgcgatatctacatttgggcccctctggctggtact |
| | | tgcggggtcctgctgctttcactcgtgatcactctttactgtaagcgcggtcggaagaagctgctg |
| | | tacatctttaagcaacccttcatgaggcctgtgcagactactcaagaggaggacggctgttcatgc |
| | | cggttcccagaggaggaggaaggcggctgcgaactgcgcgtgaaattcagccgcagcgcagatgct |
| | | ccagcctacaagcaggggcagaaccagctctacaacgaactcaatcttggtcggagagaggagtac |
| | | gacgtgctggacaagcggagaggacgggacccagaaatgggcgggaagccgcgcagaaagaatccc |
| | | caagagggcctgtacaacgagctccaaaaggataagatggcagaagcctatagcgagattggtatg |
| | | aaaggggaacgcagaagaggcaaaggccacgacggactgtaccagggactcagcaccgccaccaag |
| | | gacacctatgacgctcttcacatgcaggccctgccgcctcgg |
| CAR22-34 | 400 | qvqlqesgpglvkpsgtlsltcavsgasitsrhwwnwvrhspgkglewigqiyhsgtttynpslgs |
| scFv AA | | rvtisvdksknqislelrsvtaadtatyycvrdylelatyygmdvwgqgttvtvssggggsggggs |
| | | ggggseivltqsplslpvtpgepasiscrssqsllysdgynyldwylqkpgqspqlliylgsnras |
| | | gvpdrfsgsgsgtdftlqisgvetedvgvyycmqalqtqsfgqgtkleik |
| CAR22-34 | 401 | caagtgcagcttcaagaatcaggacctggcctcgtcaaaccctccggtaccctctccctcacctgt |
| scFv NT | | gccgtgtccggggcatctatcacctcccgccactggtggaactgggtcagacactccccgggaaag |
| | | ggattggagtggattggccagatctaccattccggcaccactacttacaacccgtccctgggctcc |
| | | cgcgtcactatctccgtggacaagtccaagaatcagattagcctggagctgcggtccgtgaccgct |
| | | gccgataccgcgacctattactgcgtgcgggactacctggagctcgccacgtactacggaatggac |
| | | gtctggggccagggcactaccgtgaccgtgtcaagcggggggggcggatcgggtggtggaggatcg |
| | | ggaggaggagggtcggaaatcgtgctgactcagtcccccctgtcgctgcctgtgactcctggggaa |
| | | ccagcctcaattagctgccgctcgagccagtccctgctgtattccgacggatacaactacctggat |
| | | tggtaccttcaaaagcccggccagagcccgcagctgctgatctacctgggttcaaacagggcctcc |
| | | ggcgtgccggatcggttctcgggaagcggtagcgggacagacttcaccctgcaaatcagcggagtg |
| | | gaaactgaggacgtgggcgtgtactactgcatgcaggcgttgcagacccagtcctttggacaaggc |
| | | accaagctcgaaatcaag |
| CAR22-34 | 402 | atggccctccctgtcaccgccctgctgcttccgctggctcttctgctccacgccgctcggccccaa |
| soluble scFv | | gtgcagcttcaagaatcaggacctggcctcgtcaaaccctccggtaccctctccctcacctgtgcc |
| NT | | gtgtccggggcatctatcacctcccgccactggtggaactgggtcagacactccccgggaaaggga |
| | | ttggagtggattggccagatctaccattccggcaccactacttacaacccgtccctgggctcccgc |
| | | gtcactatctccgtggacaagtccaagaatcagattagcctggagctgcggtccgtgaccgctgcc |
| | | gataccgcgacctattactgcgtgcgggactacctggagctcgccacgtactacggaatggacgtc |
| | | tggggccagggcactaccgtgaccgtgtcaagcggggggggcggatcgggtggtggaggatcggga |
| | | ggaggagggtcggaaatcgtgctgactcagtcccccctgtcgctgcctgtgactcctggggaacca |
| | | gcctcaattagctgccgctcgagccagtccctgctgtattccgacggatacaactacctggattgg |
| | | taccttcaaaagcccggccagagcccgcagctgctgatctacctgggttcaaacagggcctccggc |
| | | gtgccggatcggttctcgggaagcggtagcgggacagacttcaccctgcaaatcagcggagtggaa |
| | | actgaggacgtgggcgtgtactactgcatgcaggcgttgcagacccagtcctttggacaaggcacc |
| | | aagctcgaaatcaagggatcgcaccaccatcaccatcatcatcac |
| CAR22-34 | 403 | Malpvtalllplalllhaarpqvqlqesgpglvkpsgtlsltcavsgasitsrhwwnwvrhspgkg |
| soluble scFv | | lewigqiyhsgtttynpslgsrvtisvdksknqislelrsvtaadtatyycvrdylelatyygmdv |
| AA | | wgqgttvtvssggggsggggsggggseivltqsplslpvtpgepasiscrssqsllysdgynyldw |
| | | ylqkpgqspqlliylgsnrasgvpdrfsgsgsgtdftlqisgvetedvgvyycmqalqtqsfgqgt |
| | | kleikgshhhhhhhh |
| CAR22-34 | 404 | malpvtalllplalllhaarpqvqlqesgpglvkpsgtlsltcavsgasitsrhwwnwvrhspgkg |
| Full AA | | lewigqiyhsgtttynpslgsrvtisvdksknqislelrsvtaadtatyycvrdylelatyygmdv |
| | | wgqgttvtvssggggsggggsggggseivltqsplslpvtpgepasiscrssqsllysdgynyldw |
| | | ylqkpgqspqlliylgsnrasgvpdrfsgsgsgtdftlqisgvetedvgvyycmqalqtqsfgqgt |
| | | kleiktttpaprpptpaptiasqplslrpeacrpaaggavhtrgldfacdiyiwaplagtcgvlll |
| | | slvitlyckrgrkkllyifkqpfmrpvqttqeedgcscrfpeeeeggcelrvkfsrsadapaykqg |
| | | qnqlynelnlgrreeydvldkrrgrdpemggkprrknpqeglynelqkdkmaeayseigmkgerrr |
| | | gkghdglyqglstatkdtydalhmqalppr |
| CAR22-34 | 405 | atggccctccctgtcaccgccctgctgcttccgctggctcttctgctccacgccgctcggccccaa |
| Full NT | | gtgcagcttcaagaatcaggacctggcctcgtcaaaccctccggtaccctctccctcacctgtgcc |
| | | gtgtccggggcatctatcacctcccgccactggtggaactgggtcagacactccccgggaaaggga |
| | | ttggagtggattggccagatctaccattccggcaccactacttacaacccgtccctgggctcccgc |
| | | gtcactatctccgtggacaagtccaagaatcagattagcctggagctgcggtccgtgaccgctgcc |
| | | gataccgcgacctattactgcgtgcgggactacctggagctcgccacgtactacggaatggacgtc |
| | | tggggccagggcactaccgtgaccgtgtcaagcggggggggcggatcgggtggtggaggatcggga |
| | | ggaggagggtcggaaatcgtgctgactcagtcccccctgtcgctgcctgtgactcctggggaacca |
| | | gcctcaattagctgccgctcgagccagtccctgctgtattccgacggatacaactacctggattgg |
| | | taccttcaaaagcccggccagagcccgcagctgctgatctacctgggttcaaacagggcctccggc |
| | | gtgccggatcggttctcgggaagcggtagcgggacagacttcaccctgcaaatcagcggagtggaa |
| | | actgaggacgtgggcgtgtactactgcatgcaggcgttgcagacccagtcctttggacaaggcacc |
| | | aagctcgaaatcaagaccactaccccagcaccgaggccacccaccccggctcctaccatcgcctcc |
| | | cagcctctgtccctgcgtccggaggcatgtagacccgcagctggtggggccgtgcatacccggggt |
| | | cttgacttcgcctgcgatatctacatttgggcccctctggctggtacttgcggggtcctgctgctt |
| | | tcactcgtgatcactctttactgtaagcgcggtcggaagaagctgctgtacatctttaagcaaccc |
| | | ttcatgaggcctgtgcagactactcaagaggaggacggctgttcatgccggttcccagaggaggag |
| | | gaaggcggctgcgaactgcgcgtgaaattcagccgcagcgcagatgctccagcctacaagcagggg |
| | | cagaaccagctctacaacgaactcaatcttggtcggagagaggagtacgacgtgctggacaagcgg |
| | | agaggacgggacccagaaatgggcgggaagccgcgcagaaagaatccccaagagggcctgtacaac |
| | | gagctccaaaaggataagatggcagaagcctatagcgagattggtatgaaaggggaacgcagaaga |
| | | ggcaaaggccacgacggactgtaccagggactcagcaccgccaccaaggacacctatgacgctctt |
| | | cacatgcaggccctgccgcctcgg |
| CAR22-35 | 406 | qvqlvqsgaevkkpgasvkvsckasgytftsyymhwvrqapgqglewmgiinpsggstsyaqkfqg |
| scFv AA | | rvtmtrdtststvymelsslrsedtavyycardlaaagnyyyygmdvwgqgttvtvssggggsggg |
| | | gsggggssseltqdpavsvalgqtaritcqgdslrsyftswyhqkpgqapvlviygnnnrpsgipd |
| | | rfsgsssgntasltitgaqaedegdyycdsrdssgdhlvfgggtkltvl |
| CAR22-35 | 407 | caagtccaactcgtccagtccggtgcagaagtcaagaaaccaggagcttcagtgaaagtgtcgtgc |
| scFv NT | | aaggcctccggctataccttcacctcctactacatgcactgggtgcgccaggccccgggccaggga |
| | | ctggagtggatgggaattatcaacccttcgggcggctccactagctacgcccaaaagtttcagggg |
| | | agagtgaccatgactcgggacacctcaacctcgaccgtgtacatggaactgtcgtcactgcggtcc |
| | | gaggacaccgccgtgtactactgcgcgcgcgacttggccgccgcggggaattactactactacgga |
| | | atggatgtctggggacagggaaccactgtgactgtgtcgtctggtggtggtggaagcgggggagga |
| | | ggttcgggcggcggcggaagctcctccgaactgacccaggaccctgcggtgtccgtggccctggga |
| | | cagaccgcaaggatcacgtgtcagggagacagcctccgctcctacttcacatcctggtatcatcag |
| | | aagcccggccaggctccggtgctggtcatctacggaaacaacaacagaccgtccgggattcccgac |
| | | cggttcagcggctcctcatccggcaacaccgcctccctgaccatcaccggcgcccaggccgaggac |
| | | gagggagattactactgcgactcccgggatagcagcggcgatcacctcgtgttcgggggagggact |
| | | aagcttactgtgctg |
| CAR22-35 | 408 | atggccctccctgtcaccgccctgctgcttccgctggctcttctgctccacgccgctcggccccaa |
| soluble scFv | | gtccaactcgtccagtccggtgcagaagtcaagaaaccaggagcttcagtgaaagtgtcgtgcaag |
| NT | | gcctccggctataccttcacctcctactacatgcactgggtgcgccaggccccgggccagggactg |
| | | gagtggatgggaattatcaacccttcgggcggctccactagctacgcccaaaagtttcaggggaga |
| | | gtgaccatgactcgggacacctcaacctcgaccgtgtacatggaactgtcgtcactgcggtccgag |
| | | gacaccgccgtgtactactgcgcgcgcgacttggccgccgcggggaattactactactacggaatg |
| | | gatgtctggggacagggaaccactgtgactgtgtcgtctggtggtggtggaagcgggggaggaggt |
| | | tcgggcggcggcggaagctcctccgaactgacccaggaccctgcggtgtccgtggccctgggacag |
| | | accgcaaggatcacgtgtcagggagacagcctccgctcctacttcacatcctggtatcatcagaag |
| | | cccggccaggctccggtgctggtcatctacggaaacaacaacagaccgtccgggattcccgaccgg |
| | | ttcagcggctcctcatccggcaacaccgcctccctgaccatcaccggcgcccaggccgaggacgag |
| | | ggagattactactgcgactcccgggatagcagcggcgatcacctcgtgttcgggggagggactaag |
| | | cttactgtgctgggatcgcaccaccatcaccatcatcatcac |
| CAR22-35 | 409 | malpvtalllplalllhaarpqvqlvqsgaevkkpgasvkvsckasgytftsyymhwvrqapgqgl |
| soluble scFv | | ewmgiinpsggstsyaqkfqgrvtmtrdtststvymelsslrsedtavyycardlaaagnyyyygm |
| AA | | dvwgqgttvtvssggggsggggsggggssseltqdpavsvalgqtaritcqgdslrsyftswyhqk |
| | | pgqapvlviygnnnrpsgipdrfsgsssgntasltitgaqaedegdyycdsrdssgdhlvfgggtk |
| | | ltvlgshhhhhhhh |
| CAR22-35 | 410 | malpvtalllplalllhaarpqvqlvqsgaevkkpgasvkvsckasgytftsyymhwvrqapgqgl |
| Full AA | | ewmgiinpsggstsyaqkfqgrvtmtrdtststvymelsslrsedtavyycardlaaagnyyyygm |
| | | dvwgqgttvtvssggggsggggsggggssseltqdpavsvalgqtaritcqgdslrsyftswyhqk |
| | | pgqapvlviygnnnrpsgipdrfsgsssgntasltitgaqaedegdyycdsrdssgdhlvfgggtk |
| | | ltvltttpaprpptpaptiasqplslrpeacrpaaggavhtrgldfacdiyiwaplagtcgvllls |
| | | lvitlyckrgrkkllyifkqpfmrpvqttqeedgcscrfpeeeeggcelrvkfsrsadapaykqgq |
| | | nqlynelnlgrreeydvldkrrgrdpemggkprrknpqeglynelqkdkmaeayseigmkgerrrg |
| | | kghdglyqglstatkdtydalhmqalppr |
| CAR22-35 | 411 | atggccctccctgtcaccgccctgctgcttccgctggctcttctgctccacgccgctcggccccaa |
| Full NT | | gtccaactcgtccagtccggtgcagaagtcaagaaaccaggagcttcagtgaaagtgtcgtgcaag |
| | | gcctccggctataccttcacctcctactacatgcactgggtgcgccaggccccgggccagggactg |
| | | gagtggatgggaattatcaacccttcgggcggctccactagctacgcccaaaagtttcaggggaga |
| | | gtgaccatgactcgggacacctcaacctcgaccgtgtacatggaactgtcgtcactgcggtccgag |
| | | gacaccgccgtgtactactgcgcgcgcgacttggccgccgcggggaattactactactacggaatg |
| | | gatgtctggggacagggaaccactgtgactgtgtcgtctggtggtggtggaagcgggggaggaggt |
| | | tcgggcggcggcggaagctcctccgaactgacccaggaccctgcggtgtccgtggccctgggacag |
| | | accgcaaggatcacgtgtcagggagacagcctccgctcctacttcacatcctggtatcatcagaag |
| | | cccggccaggctccggtgctggtcatctacggaaacaacaacagaccgtccgggattcccgaccgg |
| | | ttcagcggctcctcatccggcaacaccgcctccctgaccatcaccggcgcccaggccgaggacgag |
| | | ggagattactactgcgactcccgggatagcagcggcgatcacctcgtgttcgggggagggactaag |
| | | cttactgtgctgaccactaccccagcaccgaggccacccaccccggctcctaccatcgcctcccag |
| | | cctctgtccctgcgtccggaggcatgtagacccgcagctggtggggccgtgcatacccggggtctt |
| | | gacttcgcctgcgatatctacatttgggcccctctggctggtacttgcggggtcctgctgctttca |
| | | ctcgtgatcactctttactgtaagcgcggtcggaagaagctgctgtacatctttaagcaacccttc |
| | | atgaggcctgtgcagactactcaagaggaggacggctgttcatgccggttcccagaggaggaggaa |
| | | ggcggctgcgaactgcgcgtgaaattcagccgcagcgcagatgctccagcctacaagcaggggcag |
| | | aaccagctctacaacgaactcaatcttggtcggagagaggagtacgacgtgctggacaagcggaga |
| | | ggacgggacccagaaatgggcgggaagccgcgcagaaagaatccccaagagggcctgtacaacgag |
| | | ctccaaaaggataagatggcagaagcctatagcgagattggtatgaaaggggaacgcagaagaggc |
| | | aaaggccacgacggactgtaccagggactcagcaccgccaccaaggacacctatgacgctcttcac |
| | | atgcaggccctgccgcctcgg |
| CAR22-36 | 412 | Qvqlvqsgaevkkpgasvkvsckasgytftsyymhwvrqapgqglewmgiinpsggstsyaqkfqg |
| scFv AA | | rvtmtrdtststvymelsslrsedtavyycardddfwsgsgafdiwgqgttvtvssggggsggggs |
| | | ggggssseltqdpavsvalgqtvritcqgdslrsyyaswyqqkpgqapvlviygknnrpsgipdrf |
| | | sgsssgntasltitgaqaedeadyycnsrdssgnhpvvfgggtkltvl |
| CAR22-36 | 413 | caagtccaactcgtccaatccggtgcagaagtcaagaaacctggagcttccgtgaaagtgtcctgc |
| scFv NT | | aaggcgtcaggctacacctttacgtcctactacatgcactgggtccgccaggccccgggccagggc |
| | | ttggagtggatgggaatcattaaccccagcggcggcagcactagctatgcccagaagttccagggt |
| | | cgggtcaccatgactagagacacatccacctccaccgtgtacatggaactgagctccctgcggtcc |
| | | gaggataccgcggtgtactactgcgcccgcgatgacgacttctggtccggctcgggggcattcgac |
| | | atctggggacagggcaccaccgtgactgtgtcctccggcggtggaggatcgggtggcggaggaagc |
| | | ggtggaggcggatcttcgtccgaactgactcaggaccctgccgtgtcggtggccctgggacagact |
| | | gtgcgcatcacctgtcaaggagatagcctgaggtcgtactatgcctcctggtaccagcagaagccc |
| | | ggacaggccccggtgcttgtgatctacgggaagaacaacagaccgtcagggattccagaccggttc |
| | | agcgggtcatccagcgggaataccgcttccctcactatcaccggagcccaggcggaggacgaggcc |
| | | gattactactgcaactcgcgggactcatccggcaaccatcccgtggtgttcggagggggcactaag |
| | | ctgaccgtgctg |
| CAR22-36 | 414 | atggccctccctgtcaccgccctgctgcttccgctggctcttctgctccacgccgctcggccccaa |
| soluble scFv | | gtccaactcgtccaatccggtgcagaagtcaagaaacctggagcttccgtgaaagtgtcctgcaag |
| NT | | gcgtcaggctacacctttacgtcctactacatgcactgggtccgccaggccccgggccagggcttg |
| | | gagtggatgggaatcattaaccccagcggcggcagcactagctatgcccagaagttccagggtcgg |
| | | gtcaccatgactagagacacatccacctccaccgtgtacatggaactgagctccctgcggtccgag |
| | | gataccgcggtgtactactgcgcccgcgatgacgacttctggtccggctcgggggcattcgacatc |
| | | tggggacagggcaccaccgtgactgtgtcctccggcggtggaggatcgggtggcggaggaagcggt |
| | | ggaggcggatcttcgtccgaactgactcaggaccctgccgtgtcggtggccctgggacagactgtg |
| | | cgcatcacctgtcaaggagatagcctgaggtcgtactatgcctcctggtaccagcagaagcccgga |
| | | caggccccggtgcttgtgatctacgggaagaacaacagaccgtcagggattccagaccggttcagc |
| | | gggtcatccagcgggaataccgcttccctcactatcaccggagcccaggcggaggacgaggccgat |
| | | tactactgcaactcgcgggactcatccggcaaccatcccgtggtgttcggagggggcactaagctg |
| | | accgtgctgggatcgcaccaccatcaccatcatcatcac |
| CAR22-36- | 415 | malpvtalllplalllhaarpqvqlvqsgaevkkpgasvkvsckasgytftsyymhwvrqapgqgl |
| soluble scFv | | ewmgiinpsggstsyaqkfqgrvtmtrdtststvymelsslrsedtavyycardddfwsgsgafdi |
| AA | | wgqgttvtvssggggsggggsggggssseltqdpavsvalgqtvritcqgdslrsyyaswyqqkpg |
| | | qapvlviygknnrpsgipdrfsgsssgntasltitgaqaedeadyycnsrdssgnhpvvfgggtkl |
| | | tvlgshhhhhhhh |
| CAR22-36 | 416 | malpvtalllplalllhaarpqvqlvqsgaevkkpgasvkvsckasgytftsyymhwvrqapgqgl |
| Full AA | | ewmgiinpsggstsyaqkfqgrvtmtrdtststvymelsslrsedtavyycardddfwsgsgafdi |
| | | wgqgttvtvssggggsggggsggggssseltqdpavsvalgqtvritcqgdslrsyyaswyqqkpg |
| | | qapvlviygknnrpsgipdrfsgsssgntasltitgaqaedeadyycnsrdssgnhpvvfgggtkl |
| | | tvltttpaprpptpaptiasqplslrpeacrpaaggavhtrgldfacdiyiwaplagtcgvlllsl |
| | | vitlyckrgrkkllyifkqpfmrpvqttqeedgcscrfpeeeeggcelrvkfsrsadapaykqgqn |
| | | qlynelnlgrreeydvldkrrgrdpemggkprrknpqeglynelqkdkmaeayseigmkgerrrgk |
| | | ghdglyqglstatkdtydalhmqalppr |
| CAR22-36 | 417 | atggccctccctgtcaccgccctgctgcttccgctggctcttctgctccacgccgctcggccccaa |
| Full NT | | gtccaactcgtccaatccggtgcagaagtcaagaaacctggagcttccgtgaaagtgtcctgcaag |
| | | gcgtcaggctacacctttacgtcctactacatgcactgggtccgccaggccccgggccagggcttg |
| | | gagtggatgggaatcattaaccccagcggcggcagcactagctatgcccagaagttccagggtcgg |
| | | gtcaccatgactagagacacatccacctccaccgtgtacatggaactgagctccctgcggtccgag |
| | | gataccgcggtgtactactgcgcccgcgatgacgacttctggtccggctcgggggcattcgacatc |
| | | tggggacagggcaccaccgtgactgtgtcctccggcggtggaggatcgggtggcggaggaagcggt |
| | | ggaggcggatcttcgtccgaactgactcaggaccctgccgtgtcggtggccctgggacagactgtg |
| | | cgcatcacctgtcaaggagatagcctgaggtcgtactatgcctcctggtaccagcagaagcccgga |
| | | caggccccggtgcttgtgatctacgggaagaacaacagaccgtcagggattccagaccggttcagc |
| | | gggtcatccagcgggaataccgcttccctcactatcaccggagcccaggcggaggacgaggccgat |
| | | tactactgcaactcgcgggactcatccggcaaccatcccgtggtgttcggagggggcactaagctg |
| | | accgtgctgaccactaccccagcaccgaggccacccaccccggctcctaccatcgcctcccagcct |
| | | ctgtccctgcgtccggaggcatgtagacccgcagctggtggggccgtgcatacccggggtcttgac |
| | | ttcgcctgcgatatctacatttgggcccctctggctggtacttgcggggtcctgctgctttcactc |
| | | gtgatcactctttactgtaagcgcggtcggaagaagctgctgtacatctttaagcaacccttcatg |
| | | aggcctgtgcagactactcaagaggaggacggctgttcatgccggttcccagaggaggaggaaggc |
| | | ggctgcgaactgcgcgtgaaattcagccgcagcgcagatgctccagcctacaagcaggggcagaac |
| | | cagctctacaacgaactcaatcttggtcggagagaggagtacgacgtgctggacaagcggagagga |
| | | cgggacccagaaatgggcgggaagccgcgcagaaagaatccccaagagggcctgtacaacgagctc |
| | | caaaaggataagatggcagaagcctatagcgagattggtatgaaaggggaacgcagaagaggcaaa |
| | | ggccacgacggactgtaccagggactcagcaccgccaccaaggacacctatgacgctcttcacatg |
| | | caggccctgccgcctcgg |
| CAR22-37 | 418 | qvqlvqsgaevkkpgasvkvsckasgytftsyymhwvrqapgqglewmgiinpsggstsyaqkfqg |
| scFv AA | | rvtmtrdtststvymelsslrsedtavyycarpegvsyydssvldywgqgtlvtvssggggsgggg |
| | | sggggsqsaltqpasvsgspgqsitisctgtssdvggykhvswyqhhpgkapklmiydvsnrpsgv |
| | | snrfsgsksgntasltvsglqaedeahyycvsyrnfnslvfgtgtkvtvl |
| CAR22-37 | 117 | caagtccaactcgtccagtccggtgcagaagtcaagaaacccggagcttccgtgaaagtgtcctgc |
| scFv NT | | aaggcctcggggtataccttcacttcctactacatgcactgggtccggcaggcgccgggacaggga |
| | | ctggaatggatgggtatcatcaacccctcgggcggttccactagctacgcccagaagttccaggga |
| | | agagtgaccatgacccgggacacttccacttcgaccgtgtacatggaactgagcagcctgaggagc |
| | | gaggacaccgccgtgtactactgtgcccggcccgagggagtgtcctactacgattcctccgtgctg |
| | | gattactggggacagggaacacttgtgaccgtgtcctcgggaggaggcggaagcgggggcggaggg |
| | | tctgggggaggcggctcccagtccgctctgacgcagcctgcgtccgtgtccgggagccctggccag |
| | | agcattactatttcatgcaccggtaccagctccgacgtgggcggatataagcacgtgtcatggtac |
| | | cagcatcacccgggaaaggccccaaagctgatgatctacgacgtgtcgaacagaccgagcggggtg |
| | | tcaaatcgcttttccggttcaaagtcgggcaacactgcctcactcaccgtgtcgggcctccaagcg |
| | | gaggacgaagcccactactactgcgtgtcctaccgcaacttcaactccttggtgttcggcaccggc |
| | | accaaggtcaccgtcctg |
| CAR22-37 | 419 | atggccctccctgtcaccgccctgctgcttccgctggctcttctgctccacgccgctcggccccaa |
| soluble scFv | | gtccaactcgtccagtccggtgcagaagtcaagaaacccggagcttccgtgaaagtgtcctgcaag |
| NT | | gcctcggggtataccttcacttcctactacatgcactgggtccggcaggcgccgggacagggactg |
| | | gaatggatgggtatcatcaacccctcgggcggttccactagctacgcccagaagttccagggaaga |
| | | gtgaccatgacccgggacacttccacttcgaccgtgtacatggaactgagcagcctgaggagcgag |
| | | gacaccgccgtgtactactgtgcccggcccgagggagtgtcctactacgattcctccgtgctggat |
| | | tactggggacagggaacacttgtgaccgtgtcctcgggaggaggcggaagcgggggcggagggtct |
| | | gggggaggcggctcccagtccgctctgacgcagcctgcgtccgtgtccgggagccctggccagagc |
| | | attactatttcatgcaccggtaccagctccgacgtgggcggatataagcacgtgtcatggtaccag |
| | | catcacccgggaaaggccccaaagctgatgatctacgacgtgtcgaacagaccgagcggggtgtca |
| | | aatcgcttttccggttcaaagtcgggcaacactgcctcactcaccgtgtcgggcctccaagcggag |
| | | gacgaagcccactactactgcgtgtcctaccgcaacttcaactccttggtgttcggcaccggcacc |
| | | aaggtcaccgtcctgggatcgcaccaccatcaccatcatcatcac |
| CAR22-37 | 420 | Malpvtalllplalllhaarpqvqlvqsgaevkkpgasvkvsckasgytftsyymhwvrqapgqgl |
| soluble scFv | | ewmgiinpsggstsyaqkfqgrvtmtrdtststvymelsslrsedtavyycarpegvsyydssvld |
| AA | | ywgqgtlvtvssggggsggggsggggsqsaltqpasvsgspgqsitisctgtssdvggykhvswyq |
| | | hhpgkapklmiydvsnrpsgvsnrfsgsksgntasltvsglqaedeahyycvsyrnfnslvfgtgt |
| | | kvtvlgshhhhhhhh |
| CAR22-37 | 421 | malpvtalllplalllhaarpqvqlvqsgaevkkpgasvkvsckasgytftsyymhwvrqapgqgl |
| Full AA | | ewmgiinpsggstsyaqkfqgrvtmtrdtststvymelsslrsedtavyycarpegvsyydssvld |
| | | ywgqgtlvtvssggggsggggsggggsqsaltqpasvsgspgqsitisctgtssdvggykhvswyq |
| | | hhpgkapklmiydvsnrpsgvsnrfsgsksgntasltvsglqaedeahyycvsyrnfnslvfgtgt |
| | | kvtvltttpaprpptpaptiasqplslrpeacrpaaggavhtrgldfacdiyiwaplagtcgvlll |
| | | slvitlyckrgrkkllyifkqpfmrpvqttqeedgcscrfpeeeeggcelrvkfsrsadapaykqg |
| | | qnqlynelnlgrreeydvldkrrgrdpemggkprrknpqeglynelqkdkmaeayseigmkgerrr |
| | | gkghdglyqglstatkdtydalhmqalppr |
| CAR22-37 | 422 | atggccctccctgtcaccgccctgctgcttccgctggctcttctgctccacgccgctcggccccaa |
| Full NT | | gtccaactcgtccagtccggtgcagaagtcaagaaacccggagcttccgtgaaagtgtcctgcaag |
| | | gcctcggggtataccttcacttcctactacatgcactgggtccggcaggcgccgggacagggactg |
| | | gaatggatgggtatcatcaacccctcgggcggttccactagctacgcccagaagttccagggaaga |
| | | gtgaccatgacccgggacacttccacttcgaccgtgtacatggaactgagcagcctgaggagcgag |
| | | gacaccgccgtgtactactgtgcccggcccgagggagtgtcctactacgattcctccgtgctggat |
| | | tactggggacagggaacacttgtgaccgtgtcctcgggaggaggcggaagcgggggcggagggtct |
| | | gggggaggcggctcccagtccgctctgacgcagcctgcgtccgtgtccgggagccctggccagagc |
| | | attactatttcatgcaccggtaccagctccgacgtgggcggatataagcacgtgtcatggtaccag |
| | | catcacccgggaaaggccccaaagctgatgatctacgacgtgtcgaacagaccgagcggggtgtca |
| | | aatcgcttttccggttcaaagtcgggcaacactgcctcactcaccgtgtcgggcctccaagcggag |
| | | gacgaagcccactactactgcgtgtcctaccgcaacttcaactccttggtgttcggcaccggcacc |
| | | aaggtcaccgtcctgaccactaccccagcaccgaggccacccaccccggctcctaccatcgcctcc |
| | | cagcctctgtccctgcgtccggaggcatgtagacccgcagctggtggggccgtgcatacccggggt |
| | | cttgacttcgcctgcgatatctacatttgggcccctctggctggtacttgcggggtcctgctgctt |
| | | tcactcgtgatcactctttactgtaagcgcggtcggaagaagctgctgtacatctttaagcaaccc |
| | | ttcatgaggcctgtgcagactactcaagaggaggacggctgttcatgccggttcccagaggaggag |
| | | gaaggcggctgcgaactgcgcgtgaaattcagccgcagcgcagatgctccagcctacaagcagggg |
| | | cagaaccagctctacaacgaactcaatcttggtcggagagaggagtacgacgtgctggacaagcgg |
| | | agaggacgggacccagaaatgggcgggaagccgcgcagaaagaatccccaagagggcctgtacaac |
| | | gagctccaaaaggataagatggcagaagcctatagcgagattggtatgaaaggggaacgcagaaga |
| | | ggcaaaggccacgacggactgtaccagggactcagcaccgccaccaaggacacctatgacgctctt |
| | | cacatgcaggccctgccgcctcgg |
| CAR22-38 | 423 | qvqlvqsgaevkkpgasvkvsckasgytftsyymhwvrqapgqglewmgiinpsggstsyaqkfqg |
| scFv AA | | rvtmtrdtststvymelsslraedtavyycarggygdyldafdiwgqgttvtvssggggsggggsg |
| | | sggsqsaltqpasvsgspgqsitisctgtssdvggynyvswyqqhpgkapklmiyevsnrpsgvsn |
| | | rfsgsksgntasltisglqaedeadyycssytssstlvfgtgtqltvl |
| CAR22-38 | 424 | caagtccaactcgtccaatccggtgcagaagtcaagaaacctggagcatccgtgaaagtgtcctgc |
| scFv NT | | aaggcgtccgggtatacgttcacctcctactacatgcactgggtgcgccaggccccgggacaggga |
| | | ctggaatggatgggaatcatcaatcctagcggcggcagcaccagctacgcccagaagtttcagggc |
| | | cgcgtgaccatgaccagggacactagcacctccaccgtgtacatggaattgtccagcctgagagcc |
| | | gaggatactgctgtgtactactgcgcccggggcggatacggagattatctggacgccttcgacatt |
| | | tggggacagggcactactgtgaccgtgtcctcggggggaggcggctcggggggcggcggatcagga |
| | | tcaggcggttcccagtccgcgctgacacagcccgcttccgtgagcggttcgcccgggcagtccatc |
| | | accatttcgtgtaccggaacttcctccgacgtcggtggctacaactacgtgtcgtggtaccagcaa |
| | | catccgggaaaggccccaaagctcatgatctacgaggtgtccaaccggccgtccggggtgtcaaac |
| | | cggttcagcggctcaaagagcggaaacaccgcctccctcaccatctcgggactgcaggccgaggat |
| | | gaagcggactactactgctcgagctacacttcctcatctaccctggtgttcgggactggtacccag |
| | | cttaccgtgctg |
| CAR22-38 | 425 | atggccctccctgtcaccgccctgctgcttccgctggctcttctgctccacgccgctcggccccaa |
| soluble scFv | | gtccaactcgtccaatccggtgcagaagtcaagaaacctggagcatccgtgaaagtgtcctgcaag |
| NT | | gcgtccgggtatacgttcacctcctactacatgcactgggtgcgccaggccccgggacagggactg |
| | | gaatggatgggaatcatcaatcctagcggcggcagcaccagctacgcccagaagtttcagggccgc |
| | | gtgaccatgaccagggacactagcacctccaccgtgtacatggaattgtccagcctgagagccgag |
| | | gatactgctgtgtactactgcgcccggggcggatacggagattatctggacgccttcgacatttgg |
| | | ggacagggcactactgtgaccgtgtcctcggggggaggcggctcggggggcggcggatcaggatca |
| | | ggcggttcccagtccgcgctgacacagcccgcttccgtgagcggttcgcccgggcagtccatcacc |
| | | atttcgtgtaccggaacttcctccgacgtcggtggctacaactacgtgtcgtggtaccagcaacat |
| | | ccgggaaaggccccaaagctcatgatctacgaggtgtccaaccggccgtccggggtgtcaaaccgg |
| | | ttcagcggctcaaagagcggaaacaccgcctccctcaccatctcgggactgcaggccgaggatgaa |
| | | gcggactactactgctcgagctacacttcctcatctaccctggtgttcgggactggtacccagctt |
| | | accgtgctgggatcgcaccaccatcaccatcatcatcac |
| CAR22-38 | 426 | malpvtalllplalllhaarpqvqlvqsgaevkkpgasvkvsckasgytftsyymhwvrqapgqgl |
| soluble scFv | | ewmgiinpsggstsyaqkfqgrvtmtrdtststvymelsslraedtavyycarggygdyldafdiw |
| AA | | gqgttvtvssggggsggggsgsggsqsaltqpasvsgspgqsitisctgtssdvggynyvswyqqh |
| | | pgkapklmiyevsnrpsgvsnrfsgsksgntasltisglqaedeadyycssytssstlvfgtgtql |
| | | tvlgshhhhhhhh |
| CAR22-38 | 427 | malpvtalllplalllhaarpqvqlvqsgaevkkpgasvkvsckasgytftsyymhwvrqapgqgl |
| Full AA | | ewmgiinpsggstsyaqkfqgrvtmtrdtststvymelsslraedtavyycarggygdyldafdiw |
| | | gqgttvtvssggggsggggsgsggsqsaltqpasvsgspgqsitisctgtssdvggynyvswyqqh |
| | | pgkapklmiyevsnrpsgvsnrfsgsksgntasltisglqaedeadyycssytssstlvfgtgtql |
| | | tvltttpaprpptpaptiasqplslrpeacrpaaggavhtrgldfacdiyiwaplagtcgvlllsl |
| | | vitlyckrgrkkllyifkqpfmrpvqttqeedgcscrfpeeeeggcelrvkfsrsadapaykqgqn |
| | | qlynelnlgrreeydvldkrrgrdpemggkprrknpqeglynelqkdkmaeayseigmkgerrrgk |
| | | ghdglyqglstatkdtydalhmqalppr |
| CAR22-38 | 428 | atggccctccctgtcaccgccctgctgcttccgctggctcttctgctccacgccgctcggccccaa |
| Full NT | | gtccaactcgtccaatccggtgcagaagtcaagaaacctggagcatccgtgaaagtgtcctgcaag |
| | | gcgtccgggtatacgttcacctcctactacatgcactgggtgcgccaggccccgggacagggactg |
| | | gaatggatgggaatcatcaatcctagcggcggcagcaccagctacgcccagaagtttcagggccgc |
| | | gtgaccatgaccagggacactagcacctccaccgtgtacatggaattgtccagcctgagagccgag |
| | | gatactgctgtgtactactgcgcccggggcggatacggagattatctggacgccttcgacatttgg |
| | | ggacagggcactactgtgaccgtgtcctcggggggaggcggctcggggggcggcggatcaggatca |
| | | ggcggttcccagtccgcgctgacacagcccgcttccgtgagcggttcgcccgggcagtccatcacc |
| | | atttcgtgtaccggaacttcctccgacgtcggtggctacaactacgtgtcgtggtaccagcaacat |
| | | ccgggaaaggccccaaagctcatgatctacgaggtgtccaaccggccgtccggggtgtcaaaccgg |
| | | ttcagcggctcaaagagcggaaacaccgcctccctcaccatctcgggactgcaggccgaggatgaa |
| | | gcggactactactgctcgagctacacttcctcatctaccctggtgttcgggactggtacccagctt |
| | | accgtgctgaccactaccccagcaccgaggccacccaccccggctcctaccatcgcctcccagcct |
| | | ctgtccctgcgtccggaggcatgtagacccgcagctggtggggccgtgcatacccggggtcttgac |
| | | ttcgcctgcgatatctacatttgggcccctctggctggtacttgcggggtcctgctgctttcactc |
| | | gtgatcactctttactgtaagcgcggtcggaagaagctgctgtacatctttaagcaacccttcatg |
| | | aggcctgtgcagactactcaagaggaggacggctgttcatgccggttcccagaggaggaggaaggc |
| | | ggctgcgaactgcgcgtgaaattcagccgcagcgcagatgctccagcctacaagcaggggcagaac |
| | | cagctctacaacgaactcaatcttggtcggagagaggagtacgacgtgctggacaagcggagagga |
| | | cgggacccagaaatgggcgggaagccgcgcagaaagaatccccaagagggcctgtacaacgagctc |
| | | caaaaggataagatggcagaagcctatagcgagattggtatgaaaggggaacgcagaagaggcaaa |
| | | ggccacgacggactgtaccagggactcagcaccgccaccaaggacacctatgacgctcttcacatg |
| | | caggccctgccgcctcgg |

[1275] Several additional CD22 scFv sequences were generated and are described in Table 6B below. Clones CD22-64 and CD22-65 were based on affinity maturation of clone CD22-12 above. In some embodiments, the affinity of an affinity-matured binding domain for CD22 is stronger than that of CD22-12 for CD22. In some embodiments, the on-rate of an affinity-matured binding domain for CD22 is faster than that of CD22-12 for CD22.

TABLE 6B
Human CD22 scFv sequences

| Name | SEQ ID | Sequence |
|---|---|---|
| CAR22-53 | 131 | EVQLQQSGPGLVKPSQTLSLTCAISGDSVSSNSAAWNWIRQSPSRGLEWLGRTYYRSKWYSDYAVS |
| scFv domain | | VKSRITINPDTSKNQFSLQLNSVTPEDTAVYYCARDPYDFWSGYPDAFDIWGQGTMVTVSSGGGGS |
| AA | | GGGGSGGGGSQSALTQPASVSGSPGQSITISCTGTSSDVGGYNYVSWYQQHPGKAPKVIISEVNNR |
| | | PSGVSHRFSGSKSGNTASLTISGLQAEDEADYFCSSYTSGRTLYVFGTGSKVTVLG |
| CAR22-53 | 1108 | GAGGTACAGCTGCAGCAGTCAGGTCCAGGACTGGTGAAGCCCTCGCAGACCCTCTCACTCACCTGT |
| scFv NT | | GCCATCTCCGGGGACAGTGTCTCTAGCAACAGTGCTGCTTGGAACTGGATCAGGCAGTCCCCATCG |
| | | AGAGGCCTTGAGTGGCTGGGAAGGACATACTACAGGTCCAAGTGGTATAGTGATTATGCAGTATCT |
| | | GTGAAAAGTCGAATAACCATCAACCCAGACACATCCAAGAACCAGTTCTCCCTGCAGCTGAACTCT |
| | | GTGACTCCCGAGGACACGGCTGTGTATTACTGTGCAAGAGATCCTTACGATTTTTGGAGTGGTTAT |
| | | CCTGATGCTTTTGATATCTGGGGCCAAGGGACAATGGTCACCGTCTCTTCAGGTGGTGGTGGCAGC |
| | | GGCGGCGGCGGCTCTGGTGGTGGTGGATCCCAGTCTGCCCTGACTCAGCCTGCCTCCGTGTCTGGG |
| | | TCTCCTGGACAGTCGATCACCATCTCCTGCACTGGAACCAGCAGTGACGTTGGTGGTTACAACTAT |
| | | GTCTCCTGGTACCAACAGCACCCAGGCAAAGCCCCCAAGGTCATAATTTCTGAGGTCAATAATCGG |
| | | CCCTCAGGGGTTTCTCATCGCTTCTCTGGGTCCAAGTCTGGCAACACGGCCTCCCTGACCATCTCT |
| | | GGGCTCCAGGCTGAGGACGAGGCTGATTATTTCTGCAGCTCATATACAAGTGGCAGGACTCTTTAT |
| | | GTCTTCGGAACTGGGAGCAAGGTCACCGTCCTAGGT |
| CAR22-53 | 1109 | MALPVTALLLPLALLLHAARPEVQLQQSGPGLVKPSQTLSLTCAISGDSVSSNSAAWNWIRQSPSR |
| Full AA | | GLEWLGRTYYRSKWYSDYAVSVKSRITINPDTSKNQFSLQLNSVTPEDTAVYYCARDPYDFWSGYP |
| | | DAFDIWGQGTMVTVSSGGGGSGGGGSGGGGSQSALTQPASVSGSPGQSITISCTGTSSDVGGYNYV |
| | | SWYQQHPGKAPKVIISEVNNRPSGVSHRFSGSKSGNTASLTISGLQAEDEADYFCSSYTSGRTLYV |
| | | FGTGSKVTVLGTTTPAPRPPTPAPTIASQPLSLRPEACRPAAGGAVHTRGLDFACDIYIWAPLAGT |
| | | CGVLLLSLVITLYCKRGRKKLLYIFKQPFMRPVQTTQEEDGCSCRFPEEEEGGCELRVKFSRSADA |
| | | PAYKQGQNQLYNELNLGRREEYDVLDKRRGRDPEMGGKPRRKNPQEGLYNELQKDKMAEAYSEIGM |
| | | KGERRRGKGHDGLYQGLSTATKDTYDALHMQALPPR |
| CAR22-53 | 1110 | ATGGCCCTCCCTGTCACCGCCCTGCTGCTTCCGCTGGCTCTTCTGCTCCACGCCGCTCGGCCCGAG |
| Full NT | | GTACAGCTGCAGCAGTCAGGTCCAGGACTGGTGAAGCCCTCGCAGACCCTCTCACTCACCTGTGCC |
| (CD22-53 | | ATCTCCGGGGACAGTGTCTCTAGCAACAGTGCTGCTTGGAACTGGATCAGGCAGTCCCCATCGAGA |
| scFv + | | GGCCTTGAGTGGCTGGGAAGGACATACTACAGGTCCAAGTGGTATAGTGATTATGCAGTATCTGTG |
| humanCD8 | | AAAAGTCGAATAACCATCAACCCAGACACATCCAAGAACCAGTTCTCCCTGCAGCTGAACTCTGTG |
| alpha + 41- | | ACTCCCGAGGACACGGCTGTGTATTACTGTGCAAGAGATCCTTACGATTTTTGGAGTGGTTATCCT |
| BB + | | GATGCTTTTGATATCTGGGGCCAAGGGACAATGGTCACCGTCTCTTCAGGTGGTGGTGGCAGCGGC |
| CD3zeta) | | GGCGGCGGCTCTGGTGGTGGTGGATCCCAGTCTGCCCTGACTCAGCCTGCCTCCGTGTCTGGGTCT |
| | | CCTGGACAGTCGATCACCATCTCCTGCACTGGAACCAGCAGTGACGTTGGTGGTTACAACTATGTC |
| | | TCCTGGTACCAACAGCACCCAGGCAAAGCCCCCAAGGTCATAATTTCTGAGGTCAATAATCGGCCC |
| | | TCAGGGGTTTCTCATCGCTTCTCTGGGTCCAAGTCTGGCAACACGGCCTCCCTGACCATCTCTGGG |
| | | CTCCAGGCTGAGGACGAGGCTGATTATTTCTGCAGCTCATATACAAGTGGCAGGACTCTTTATGTC |
| | | TTCGGAACTGGGAGCAAGGTCACCGTCCTAGGTACCACTACCCCAGCACCGAGGCCACCCACCCCG |
| | | GCTCCTACCATCGCCTCCCAGCCTCTGTCCCTGCGTCCGGAGGCATGTAGACCCGCAGCTGGTGGG |
| | | GCCGTGCATACCCGGGGTCTTGACTTCGCCTGCGATATCTACATTTGGGCCCCTCTGGCTGGTACT |
| | | TGCGGGGTCCTGCTGCTTTCACTCGTGATCACTCTTTACTGTAAGCGCGGTCGGAAGAAGCTGCTG |
| | | TACATCTTTAAGCAACCCTTCATGAGGCCTGTGCAGACTACTCAAGAGGAGGACGGCTGTTCATGC |
| | | CGGTTCCCAGAGGAGGAGGAAGGCGGCTGCGAACTGCGCGTGAAATTCAGCCGCAGCGCAGATGCT |
| | | CCAGCCTACAAGCAGGGGCAGAACCAGCTCTACAACGAACTCAATCTTGGTCGGAGAGAGGAGTAC |
| | | GACGTGCTGGACAAGCGGAGAGGACGGGACCCAGAAATGGGCGGGAAGCCGCGCAGAAAGAATCCC |
| | | CAAGAGGGCCTGTACAACGAGCTCCAAAAGGATAAGATGGCAGAAGCCTATAGCGAGATTGGTATG |
| | | AAAGGGGAACGCAGAAGAGGCAAAGGCCACGACGGACTGTACCAGGGACTCAGCACCGCCACCAAG |
| | | GACACCTATGACGCTCTTCACATGCAGGCCCTGCCGCCTCGG |
| CAR 22-57 | 132 | EVQLQQSGPGLVKPSQTLSLTCAISGDSVSNNNAAWNWIRQSPSRGLEWLGRTYHRSTWYNDYVGS |
| | | VKSRITINPDTSKNQFSLQLNSVTPEDTAVYYCARETDYGDYGAFDIWGQGTTVTVSSGGGGSGGG |
| | | GSGGGGSQSALTQPASVSGSPGQSITISCTGSRNDIGAYESVSWYQQHPGNAPKLIIHGVNNRPSG |
| | | VFDRFSVSQSGNTASLTISGLQAEDEADYYCSSHTTTSTLYVFGTGTKVTVLG |
| CAR22-58 | 133 | EVQLQQSGPGLVNPSQTLSITCAISGDSVSSNSAAWNWIRQSPSRGLEWLGRTFYRSKWYNDYAVS |
| | | VKGRITISPDTSKNQFSLQLNSVTPEDTAVYYCAGGDYYYGLDVWGQGTTVTVSSGGGGSGGGGSG |
| | | GGGSQSALTQPASVSGSPGQSITISCTGSSSDVGGYNSVSWYQQHPGKAPKLMIYEVINRPSGVSH |
| | | RFSGSKSGNTASLTISGLQAEDEADYYCSSYTSSSTYVFGTGTKVTVLG |
| CAR22-59 | 134 | EVQLQQSGPGLVKPSQTLSLTCAISGDSVLSNSDTWNWIRQSPSRGLEWLGRTYHRSTWYDDYASS |
| | | VRGRVSINVDTSKNQYSLQLNAVTPEDTGVYYCARDRLQDGNSWSDAFDVWGQGTMVTVSSGGGGS |
| | | GGGGSGGGGSQSALTQPASVSGSPGQSITISCTGSSSDIGGFNYVSWYQQHAGEAPKLMIYEVTNR |
| | | PSGVSDRFSGSKSDNTASLTISGLQAEDEADYYCSSYASGSPLYVFGTGTKVTVLG |
| CAR22-60 | 135 | EVQLQQSGPGLVKPSQTLSLTCAISGDSVLSNSDTWNWIRQSPSRGLEWLGRTYHRSTWYDDYASS |
| | | VRGRVSINVDTSKNQYSLQLNAVTPEDTGVYYCARDRLQDGNSWSDAFDVWGQGTMVTVSSGGGGS |
| | | GGGGSGSGGSQSALTQPASVSGSPGQSITFSCTGTSSDIGGYNYVSWYQQHPGKAPKLMIYEVSNR |
| | | PSGVSNRFSGTKSGNTASLTISGLQAEDEADYYCSSYTSSSTLYVFGTGTKLTVLG |
| CAR22-61 | 136 | QVQLQESGPGLVKPSQTLSLTCAISGDSVLSNSDTWNWIRQSPSRGLEWLGRTYHRSTWYDDYASS |
| | | VRGRVSINVDTSKNQYSLQLNAVTPEDTGVYYCARDRLQDGNSWSDAFDVWGQGTMVTVSSGGGGS |
| | | GGGGSGSGGSQSALTQPASVSGSPGQSITISCTGTSSDVGGYNYVSWYQQHPGKAPKLMIYEVSNR |
| | | PSGVSNRFSGSKSGNTASLTISGLQAEDEADYYCSSYTSSSTLYVFGTGTKVTVLG |
| CAR22-62 | 137 | EVQLQQSGPGLVKPSQTLSLTCAISGDSVLSNSDTWNWIRQSPSRGLEWLGRTYHRSTWYDDYASS |
| | | VRGRVSINVDTSKNQYSLQLNAVTPEDTGVYYCARDRLQDGNSWSDAFDVWGQGTMVTVSSGGGGS |
| | | GGGGSGGGGSQSALTQPASVSGSPGQSITISCTGTSSDVGGYNYVSWYQQHPGKAPKLMIYDVSNR |
| | | PSGVSNRFSGSKSGNTASLTISGLQAEDEADYYCSSYTSSSTLYVFGTGTKVTVLG |
| CAR22-63 | 138 | EVQLQQSGPGLVKPSQTLSLTCAISGDSVLSNSDTWNWIRQSPSRGLEWLGRTYHRSTWYDDYASS |
| | | VRGRVSINVDTSKNQYSLQLNAVTPEDTGVYYCARDRLQDGNSWSDAFDVWGQGTMVTVSSGGGGS |
| | | GGGGSGGGGSQSALTQPASVSGSPGQSITISCTGTSSDVGGYNYVSWYQQHPGKAPKLMIYEVSNR |
| | | PSGVSNRFSGSKSGNTASLTISGLQAEDEADYYCSSYTSSSTLYIFGTGTKVTVLG |
| CAR22-64 | 139 | EVQLQQSGPGLVKPSQTLPLTCAISGDSVLSNSDTWNWIRQSPSRGLEWLGRTYHRSTWYDDYASS |
| | | VRGRVSINVDTSKNQYSLQLNAVTPEDTGVYYCARVRLQDGNSWSDAFDVWGQGTMVTVSSGGGGS |
| | | GGGGSGGGGPQSALTQPASASGSPGQSVTISCTGTSSDVGGYNYVSWYQQHPGKAPKLMIYDVSNR |
| | | PSGVSNRFSGSKSGNTASLTISGLQAEDEADYYCSSYTSSSTLYVFGTGTQLTVL |
| CAR22-65 | 140 | EVQLQQSGPGLVKPSQTLSLTCAISGDSMLSNSDTWNWIRQSPSRGLEWLGRTYHRSTWYDDYASS |
| | | VRGRVSINVDTSKNQYSLQLNAVTPEDTGVYYCARVRLQDGNSWSDAFDVWGQGTMVTVSSGGGGS |
| | | GGGGSGGGGSQSALTQPASASGSPGQSVTISCTGTSSDVGGYNYVSWYQQHPGKAPKLMIYDVSNR |
| | | PSGVSNRFSGSKSGNTASLTISGLQAEDEADYYCSSYTSSSTLYVFGTGTQLTVL |

[1276] In some embodiments, the antigen binding domain comprises a HC CDR1, a HC CDR2, and a HC CDR3 of any heavy chain binding domain amino acid sequences listed in Table 6A or 6B. In embodiments, the antigen binding domain further comprises a LC CDR1, a LC CDR2, and a LC CDR3. In embodiments, the antigen binding domain comprises a LC CDR1, a LC CDR2, and a LC CDR3 of any light chain binding domain amino acid sequences listed in Table 6A or 6B.

[1277] In some embodiments, the antigen binding domain comprises one, two or all of LC CDR1, LC CDR2, and LC CDR3 of any light chain binding domain amino acid sequences listed in Table 6A or 6B, and one, two or all of HC CDR1, HC CDR2, and HC CDR3 of any heavy chain binding domain amino acid sequences listed in Table 6A or 6B.

[1278] In some embodiments, the CDRs are defined according to the Kabat numbering scheme, the Chothia numbering scheme, or a combination thereof.

[1279] CD22-64 and CD22-65 were based on affinity maturation of clone CD22-12. All three constructs were tested and found to have activity (see Example 25 herein). Based on these observations, a structural genus was designed to encompass the working examples. Thus, in some embodiments, a CD22 binding domain described herein comprises a HCDR3 having a sequence: XRLQDGNSWSDAFDV (SEQ ID NO: 141). In some embodiments, X is any amino acid, any canonical amino acid, a nonpolar amino acid (e.g., G, A, V, L, I, P, M, F, or W), a nonpolar amino acid without an aromatic ring (e.g., G, A, V, L, I, P, or M), or an acidic amino acid (e.g., D or E).

[1280] Furthermore, CAR22-53 and CAR22-57 through CAR22-65 have structural similarities in their CDRs. A structural genus was designed to encompass these working examples. Thus, in some embodiments, a CD22 binding domain described herein comprises a LCDR1 having a sequence: TGX₁X₂X₃DX₄GX₅X₆X₇X₈VS (SEQ ID NO: 1334). In some embodiments, X₁, X₂, X₃, X₄, X₅, X₆, X₇, or X₈, or any combination thereof, is each independently any amino acid, e.g., any canonical amino acid. In some embodiments, X₄ or X₅ or both are each independently a nonpolar amino acid (e.g., G, A, V, L, I, P, M, F, or W) or a nonpolar amino acid without an aromatic ring (e.g., G, A, V, L, I, P, or M). In some embodiments, X₆ is an aromatic amino acid (e.g., F, Y, or W). In some embodiments, X₁ is S or T; X₂ is R or S; X₃ is N or S, X₄ is V or I, X₅ is A or G; X₆ is Y or F; X₇ is E or N; or X₈ is S or Y, or any combination thereof. In some embodiments, X₁ is S or T; X₂ is R or S; X₃ is N or S, X₄ is V or I, X₅ is A or G; X₆ is Y or F; X₇ is E or N; and X₈ is S or Y.

[1281] Similarly, in some embodiments, a CD22 binding domain described herein comprises a LCDR2 having a sequence: X₁VX₂NRPS (SEQ ID NO: 1335). In some embodiments, X₁ or X₂ or both is each independently any amino acid, e.g., any canonical amino acid. In some embodiments, X₁ is an acidic amino acid (e.g., D or E), a nonpolar amino acid (e.g., G, A, V, L, I, P, M, F, or W), or a nonpolar amino acid without an aromatic ring (e.g., G, A, V, L, I, P, or M). In embodiments, X₂ is a nonpolar amino acid (e.g., G, A, V, L, I, P, M, F, or W), a nonpolar amino acid without an aromatic ring (e.g., G, A, V, L, I, P, or M), or a polar uncharged amino acid (e.g., S, T, N, or Q). In some embodiments, X₁ is E, G, or D and/or X₂ is N, I, S, or T.

[1282] Similarly, in some embodiments, a CD22 binding domain described herein comprises a LCDR3 having a sequence: SSX₁X₂X₃X₄X₅X₆X₇X₈X₉ (SEQ ID NO: 1336). In some embodiments, X₁, X₂, X₃, X₄, X₅, X₆, X₇, or X₈, or any combination thereof, is each independently any amino acid, e.g., any canonical amino acid. In some embodiments, X₁ is an aromatic amino acid (e.g., F, Y, or W) or a positively charged amino acid (e.g., K, R, or H). In some embodiments, X₂ is a nonpolar amino acid (e.g., G, A, V, L, I, P, M, F, or W), a nonpolar amino acid without an aromatic ring (e.g., G, A, V, L, I, P, or M), or a polar uncharged amino acid (e.g., S, T, N, or Q). In some embodiments, X₃ is a polar uncharged amino acid (e.g., S, T, N, or Q). In some embodiments, X₄ is a nonpolar amino acid (e.g., G, A, V, L, I, P, M, F, or W), a nonpolar amino acid without an aromatic ring (e.g., G, A, V, L, I, P, or M), or a polar uncharged amino acid (e.g., S, T, N, or Q). In some embodiments, X₅ is a positively charged amino acid (e.g., K, R, or H) or a polar uncharged amino acid (e.g., S, T, N, or Q). In some embodiments, X₆ is a polar uncharged amino acid (e.g., S, T, N, or Q), a nonpolar amino acid (e.g., G, A, V, L, I, P, M, F, or W), a nonpolar amino acid without an aromatic ring (e.g., G, A, V, L, I, P, or M). In some embodiments, X₇ is a nonpolar amino acid (e.g., G, A, V, L, I, P, M, F, or W), a nonpolar amino acid without an aromatic ring (e.g., G, A, V, L, I, P, or M) or an aromatic amino acid (e.g., F, Y, or W). In some embodiments, X₈ is absent or an aromatic amino acid (e.g., F, Y, or W). In some embodiments, X₉ is a nonpolar amino acid (e.g., G, A, V, L, I, P, M, F, or W), a nonpolar amino acid without an aromatic ring (e.g., G, A, V, L, I, P, or M). In some embodiments, X₁ is Y or H, X₂ is A or T, X₃ is S or T; X₄ is G, T, or S, X₅ is R or S, X₆ is T or P, X₇ is L or Y, X₈ is Y or absent, or X₉ is V or I, or any combination thereof. In some embodiments, X₁ is Y or H, X₂ is A or T, X₃ is S or T; X₄ is G, T, or S, X₅ is R or S, X₆ is T or P, X₇ is L or Y, X₈ is Y or absent, and X₉ is V or I. The sequences of human CDR sequences of the scFv domains are shown in Table 7A, 7B, or 7C for the heavy chain variable domains and in Table 8A or 8B for the light chain variable domains. “ID” stands for the respective SEQ ID NO for each CDR.

TABLE 7A
Heavy Chain Variable Domain CDRs of CD22 CARs.
CDRs are identified according to the “combined” definition.

| | | SEQ | | SEQ | | SEQ |
|---|---|---|---|---|---|---|
| | | ID | | ID | | ID |
| Candidate | HCDR1 | NO: | HCDR2 | NO: | HCDR3 | NO: |
| m971 | GDSVSSNSAAWN | 142 | RTYYRSKWYNDYAVSVKS | 181 | EVTGDLEDAFDI | 449 |
| CAR22-1 | GFTVSSNYMS | 143 | VIYSGGSTYYADSVKG | 182 | QSTPYDSSGYYSGDAFDI | 450 |
| CAR22-2 | GDSVSSNSAAWN | 144 | RTYYRSKWYNDYAVSVKS | 183 | DLGWIAVAGTFDY | 451 |
| CAR22-3 | GDSVLSNSDTWN | 145 | RTYHRSTWYDDYASSVRG | 184 | DRLQDGNSWSDAFDV | 452 |
| CAR22-4 | GFTFDDYAMH | 146 | GISWNSGSIGYADSVKG | 185 | GLSSWHFHDALDI | 453 |
| CAR22-5 | GFTFDDYAMH | 147 | GISWNSGSIGYADSVKG | 186 | DKGGGYYDFWSGSDY | 454 |
| CAR22-6 | GDSVSSNSATWT | 148 | RTYYRSTWYNDYAVSVKS | 187 | EGSGSYYAY | 455 |
| CAR22-7 | GYTFTGYYMH | 149 | WINPNSGGTNYAQKFQG | 188 | DYWGYYGSGTLDY | 456 |
| CAR22-8 | GYTFTSYGIS | 150 | WISAYNGNTNYAQKLQG | 189 | AGLALYSNYVPYYYYGMDV | 457 |
| CAR22-9 | GFTFSNAWMN | 151 | RIKSKTDGGTADYAAPVKG | 190 | GATDV | 458 |
| CAR22-10 | GDSVLSNSDTWN | 152 | RTYHRSTWYDDYASSVRG | 191 | DRLQDGNSWSDAFDV | 459 |
| CAR22-11 | GDSVSSNSAAWN | 153 | RTYYRSKWYNDYAVSVKS | 192 | EESSSGWYEGNWFDP | 460 |
| CAR22-12 | GDSVLSNSDTWN | 154 | RTYHRSTWYDDYASSVRG | 193 | DRLQDGNSWSDAFDV | 461 |
| CAR22-13 | GGSISSSSYYWG | 155 | SIYYSGSTYYNPSLKS | 194 | GRMDTAMAQI | 462 |
| CAR22-14 | GYTFTSYYMH | 156 | IINPSGGSTSYAQKFQG | 195 | DLDVSLDI | 463 |
| CAR22-15 | GFTFSSYAMH | 157 | AISSNGGSTYYANSVKD | 196 | VHSSGYYHPGPNDY | 464 |
| CAR22-16 | GYTFTSYYMH | 158 | IINPSGGSTSYAQKFQG | 197 | EAGVVAVDY | 465 |
| CAR22-17 | GFTFSSYAMS | 159 | AISGSGGSTYYADSVKG | 198 | EPLFGVVEEDVDY | 466 |
| CAR22-18 | GYTFTSYYMH | 160 | IINPSGGSTSYAQKFQG | 199 | GSGSLGDAFDI | 467 |
| CAR22-19 | GYTFTSYYMH | 161 | IINPSGGSTSYAQKFQG | 429 | DGFGELSGAFDI | 468 |
| CAR22-20 | GYTFTSYYMH | 162 | IINPSGGSTSYAQKFQG | 430 | GPIGCSGGSCLDY | 469 |
| CAR22-21 | GYTFTSYYMH | 163 | IINPSGGSTSYAQKFQG | 431 | GSYGDYGDAFDI | 470 |
| CAR22-22 | GGTFSSYAIS | 164 | GIIPIFGTANYAQKFQG | 432 | DHKVVRFGY | 471 |
| CAR22-23 | GYTFTSYYMH | 165 | IINPSGGSTSYAQKFQG | 433 | GDYYMDV | 472 |
| CAR22-24 | GFTFSSYAMS | 166 | YISSSSSTIYYADSVKG | 434 | DGPIRYFDHSKAFDI | 473 |
| CAR22-25 | GYTFTSYYMH | 167 | IINPSGGSTSYAQKFQG | 435 | EMDDSSGPDY | 474 |
| CAR22-26 | GYSFTGSWIG | 168 | IIYPGDSDTRYSPSFQG | 436 | GFLRGGDCCGALDI | 475 |
| CAR22-27 | GGSINSYYWS | 169 | FTSHSGNVKYNPSLTG | 437 | GLDPLFAYDAFEI | 476 |
| CAR22-28 | GFTFSDYYMS | 170 | YISSSGSTIYYADSVKG | 438 | DDFWSGSVDY | 477 |
| CAR22-29 | GYTFTSYYMH | 171 | IINPSGGSTSYAQKFQG | 439 | EDDSSGYTSPFDY | 478 |
| CAR22-30 | GYTFTGYYMH | 172 | WINPNSGGTNYAQKFQG | 440 | EPASSSWYGYYYYMDV | 479 |
| CAR22-31 | GYTFTSYDIN | 173 | WMNPNSGNTGYAQKFQG | 441 | GDSNYWSYYGMDV | 480 |
| CAR22-32 | GYTFTSYGIS | 174 | WISAYNGNTNYAQKLQG | 442 | FSSSDSYDY | 481 |
| CAR22-33 | GFSLNTFGMSVS | 175 | LIDWDDDKYYSTSLRT | 443 | IYGGDRTNTQAPYFFDL | 482 |
| CAR22-34 | GASITSRHWWN | 176 | QIYHSGTTTYNPSLGS | 444 | DYLELATYYGMDV | 483 |
| CAR22-35 | GYTFTSYYMH | 177 | IINPSGGSTSYAQKFQG | 445 | DLAAAGNYYYYGMDV | 484 |
| CAR22-36 | GYTFTSYYMH | 178 | IINPSGGSTSYAQKFQG | 446 | DDDFWSGSGAFDI | 485 |
| CAR22-37 | GYTFTSYYMH | 179 | IINPSGGSTSYAQKFQG | 447 | PEGVSYYDSSVLDY | 486 |
| CAR22-38 | GYTFTSYYMH | 180 | IINPSGGSTSYAQKFQG | 448 | GGYGDYLDAFDI | 487 |

TABLE 7B
Heavy Chain Variable Domain CDRs of CD22 CARs

| | | SEQ | | SEQ | | SEQ |
|---|---|---|---|---|---|---|
| | | ID | | ID | | ID |
| Candidate | HCDR1 | NO: | HCDR2 | NO: | HCDR3 | NO: |
| CAR22-53 | SNSAAWN | 488 | RTYYRSKWYSDYAVSVKS | 499 | DPYDFWSGYPDAFDI | 510 |
| Kabat | | | | | | |
| CAR22-53 | GDSVSSNSA | 489 | YYRSKWY | 500 | DPYDFWSGYPDAFDI | 511 |
| Chothia | | | | | | |
| CAR22-53 | GDSVSSNSAAWN | 1111 | RTYYRSKWYSDYAVSVKS | 1113 | DPYDFWSGYPDAFDI | 1115 |
| Combined | | | | | | |
| Kabat/Chothia | | | | | | |
| CAR22-53 | GDSVSSNSAA | 1112 | TYYRSKWYS | 1114 | ARDPYDFWSGYPDAFDI | 1116 |
| IMGT | | | | | | |
| CAR22-57 | GDSVSNNNAAWN | 490 | RTYHRSTWYNDYVGSVKS | 501 | ETDYGDYGAFDI | 512 |
| Combined | | | | | | |
| CAR22-57 | NNNAAWN | 1337 | RTYHRSTWYNDYVGSVKS | 1346 | ETDYGDYGAFDI | 1355 |
| Kabat | | | | | | |
| CAR22-58 | GDSVSSNSAAWN | 491 | RTFYRSKWYNDYAVSVKG | 502 | GDYYYGLDV | 513 |
| Combined | | | | | | |
| CAR22-58 | SNSAAWN | 1338 | RTFYRSKWYNDYAVSVKG | 1347 | GDYYYGLDV | 1356 |
| Kabat | | | | | | |
| CAR22-59 | GDSVLSNSDTWN | 492 | RTYHRSTWYDDYASSVRG | 503 | DRLQDGNSWSDAFDV | 514 |
| Combined | | | | | | |
| CAR22-59 | SNSDTWN | 1339 | RTYHRSTWYDDYASSVRG | 1348 | DRLQDGNSWSDAFDV | 1357 |
| Kabat | | | | | | |
| CAR22-60 | GDSVLSNSDTWN | 493 | RTYHRSTWYDDYASSVRG | 504 | DRLQDGNSWSDAFDV | 515 |
| Combined | | | | | | |
| CAR22-60 | SNSDTWN | 1340 | RTYHRSTWYDDYASSVRG | 1349 | DRLQDGNSWSDAFDV | 1358 |
| Kabat | | | | | | |
| CAR22-61 | GDSVLSNSDTWN | 494 | RTYHRSTWYDDYASSVRG | 505 | DRLQDGNSWSDAFDV | 516 |
| Combined | | | | | | |
| CAR22-61 | SNSDTWN | 1341 | RTYHRSTWYDDYASSVRG | 1350 | DRLQDGNSWSDAFDV | 1359 |
| Kabat | | | | | | |
| CAR22-62 | GDSVLSNSDTWN | 495 | RTYHRSTWYDDYASSVRG | 506 | DRLQDGNSWSDAFDV | 517 |
| Combined | | | | | | |
| CAR22-62 | SNSDTWN | 1342 | RTYHRSTWYDDYASSVRG | 1351 | DRLQDGNSWSDAFDV | 1360 |
| Kabat | | | | | | |
| CAR22-63 | GDSVLSNSDTWN | 496 | RTYHRSTWYDDYASSVRG | 507 | DRLQDGNSWSDAFDV | 518 |
| Combined | | | | | | |
| CAR22-63 | SNSDTWN | 1343 | RTYHRSTWYDDYASSVRG | 1352 | DRLQDGNSWSDAFDV | 1361 |
| Kabat | | | | | | |
| CAR22-64 | GDSVLSNSDTWN | 497 | RTYHRSTWYDDYASSVRG | 508 | VRLQDGNSWSDAFDV | 519 |
| Combined | | | | | | |
| CAR22-64 | SNSDTWN | 1344 | RTYHRSTWYDDYASSVRG | 1353 | VRLQDGNSWSDAFDV | 1362 |
| Kabat | | | | | | |
| CAR22-65 | GDSMLSNSDTWN | 498 | RTYHRSTWYDDYASSVRG | 509 | VRLQDGNSWSDAFDV | 520 |
| Combined | | | | | | |
| CAR22-65 | SNSDTWN | 1345 | RTYHRSTWYDDYASSVRG | 1354 | VRLQDGNSWSDAFDV | 1363 |
| Kabat | | | | | | |

TABLE 7C
Heavy Chain Variable Domain CDRs of CD22 CARs. CDRs are
identified according to Kabat.

| | | SEQ | | SEQ | | SEQ |
|---|---|---|---|---|---|---|
| | | ID | | ID | | ID |
| Candidate | HCDR1 | NO: | HCDR2 | NO: | HCDR3 | NO: |
| m971 | SNSAAWN | 1364 | RTYYRSKWYNDYAVSVKS | 1403 | EVTGDLEDAFDI | 1442 |
| CAR22-1 | SNYMS | 1365 | VIYSGGSTYYADSVKG | 1404 | QSTPYDSSGYYSGDAFDI | 1443 |
| CAR22-2 | SNSAAWN | 1366 | RTYYRSKWYNDYAVSVKS | 1405 | DLGWIAVAGTFDY | 1444 |
| CAR22-3 | SNSDTWN | 1367 | RTYHRSTWYDDYASSVRG | 1406 | DRLQDGNSWSDAFDV | 1445 |
| CAR22-4 | DYAMH | 1368 | GISWNSGSIGYADSVKG | 1407 | GLSSWHFHDALDI | 1446 |
| CAR22-5 | DYAMH | 1369 | GISWNSGSIGYADSVKG | 1408 | DKGGGYYDFWSGSDY | 1447 |
| CAR22-6 | SNSATWT | 1370 | RTYYRSTWYNDYAVSVKS | 1409 | EGSGSYYAY | 1448 |
| CAR22-7 | GYYMH | 1371 | WINPNSGGTNYAQKFQG | 1410 | DYWGYYGSGTLDY | 1449 |
| CAR22-8 | SYGIS | 1372 | WISAYNGNTNYAQKLQG | 1411 | AGLALYSNYVPYYYYGMDV | 1450 |
| CAR22-9 | NAWMN | 1373 | RIKSKTDGGTADYAAPVKG | 1412 | GATDV | 1451 |
| CAR22-10 | SNSDTWN | 1374 | RTYHRSTWYDDYASSVRG | 1413 | DRLQDGNSWSDAFDV | 1452 |
| CAR22-11 | SNSAAWN | 1375 | RTYYRSKWYNDYAVSVKS | 1414 | EESSSGWYEGNWFDP | 1453 |
| CAR22-12 | SNSDTWN | 1376 | RTYHRSTWYDDYASSVRG | 1415 | DRLQDGNSWSDAFDV | 1454 |
| CAR22-13 | SSSYYWG | 1377 | SIYYSGSTYYNPSLKS | 1416 | GRMDTAMAQI | 1455 |
| CAR22-14 | SYYMH | 1378 | IINPSGGSTSYAQKFQG | 1417 | DLDVSLDI | 1456 |
| CAR22-15 | SYAMH | 1379 | AISSNGGSTYYANSVKD | 1418 | VHSSGYYHPGPNDY | 1457 |
| CAR22-16 | SYYMH | 1380 | IINPSGGSTSYAQKFQG | 1419 | EAGVVAVDY | 1458 |
| CAR22-17 | SYAMS | 1381 | AISGSGGSTYYADSVKG | 1420 | EPLFGVVEEDVDY | 1459 |
| CAR22-18 | SYYMH | 1382 | IINPSGGSTSYAQKFQG | 1421 | GSGSLGDAFDI | 1460 |
| CAR22-19 | SYYMH | 1383 | IINPSGGSTSYAQKFQG | 1422 | DGFGELSGAFDI | 1461 |
| CAR22-20 | SYYMH | 1384 | IINPSGGSTSYAQKFQG | 1423 | GPIGCSGGSCLDY | 1462 |
| CAR22-21 | SYYMH | 1385 | IINPSGGSTSYAQKFQG | 1424 | GSYGDYGDAFDI | 1463 |
| CAR22-22 | SYAIS | 1386 | GIIPIFGTANYAQKFQG | 1425 | DHKVVRFGY | 1464 |
| CAR22-23 | SYYMH | 1387 | IINPSGGSTSYAQKFQG | 1426 | GDYYMDV | 1465 |
| CAR22-24 | SYAMS | 1388 | YISSSSSTIYYADSVKG | 1427 | DGPIRYFDHSKAFDI | 1466 |
| CAR22-25 | SYYMH | 1389 | IINPSGGSTSYAQKFQG | 1428 | EMDDSSGPDY | 1467 |
| CAR22-26 | GSWIG | 1390 | IIYPGDSDTRYSPSFQG | 1429 | GFLRGGDCCGALDI | 1468 |
| CAR22-27 | SYYWS | 1391 | FTSHSGNVKYNPSLTG | 1430 | GLDPLFAYDAFEI | 1469 |
| CAR22-28 | DYYMS | 1392 | YISSSGSTIYYADSVKG | 1431 | DDFWSGSVDY | 1470 |
| CAR22-29 | SYYMH | 1393 | IINPSGGSTSYAQKFQG | 1432 | EDDSSGYTSPFDY | 1471 |
| CAR22-30 | GYYMH | 1394 | WINPNSGGTNYAQKFQG | 1433 | EPASSSWYGYYYYMDV | 1472 |
| CAR22-31 | SYDIN | 1395 | WMNPNSGNTGYAQKFQG | 1434 | GDSNYWSYYGMDV | 1473 |
| CAR22-32 | SYGIS | 1396 | WISAYNGNTNYAQKLQG | 1435 | FSSSDSYDY | 1474 |
| CAR22-33 | TFGMSVS | 1397 | LIDWDDDKYYSTSLRT | 1436 | IYGGDRTNTQAPYFFDL | 1475 |
| CAR22-34 | TSRHWWN | 1398 | QIYHSGTTTYNPSLGS | 1437 | DYLELATYYGMDV | 1476 |
| CAR22-35 | SYYMH | 1399 | IINPSGGSTSYAQKFQG | 1438 | DLAAAGNYYYYGMDV | 1477 |
| CAR22-36 | SYYMH | 1400 | IINPSGGSTSYAQKFQG | 1439 | DDDFWSGSGAFDI | 1478 |
| CAR22-37 | SYYMH | 1401 | IINPSGGSTSYAQKFQG | 1440 | PEGVSYYDSSVLDY | 1479 |
| CAR22-38 | SYYMH | 1402 | IINPSGGSTSYAQKFQG | 1441 | GGYGDYLDAFDI | 1480 |

TABLE 8A
Light Chain Variable Domain CDRs of CD22 CARs.
The LC CDR sequences in this table have the same
sequence under the Kabat or combined definitions.

| | | SEQ | | SEQ | | SEQ |
|---|---|---|---|---|---|---|
| | | ID | | ID | | ID |
| Candidate | LCDR1 | NO: | LCDR2 | NO: | LCDR3 | NO: |
| m971 | RASQTIWSYLN | 521 | AASSLQS | 560 | QQSYSIPQT | 599 |
| CAR22-1 | SGSSSNIGSNYVY | 522 | RNNQRPS | 561 | AAWDDSLSGYV | 600 |
| CAR22-2 | TGTSSDVGGYNYVS | 523 | DVSKRPS | 562 | SSYTSSSLNHV | 601 |
| CAR22-3 | TGTSSDVGGYNYVS | 524 | DVSNRPS | 563 | SSYTSSSTPYV | 602 |
| CAR22-4 | QGDSLRSYYAS | 525 | GKNNRPS | 564 | NSRDSSGNHLWV | 603 |
| CAR22-5 | QGDSLRSYYAS | 526 | GKNNRPS | 565 | NSRDSSGWV | 604 |
| CAR22-6 | TGTSSDVGGYNYVS | 527 | DVSNRPS | 566 | SSYTSSSTLYV | 605 |
| CAR22-7 | TGTSSDVGGYNYVS | 528 | DVSSRPS | 567 | SSYAGSNTLV | 606 |
| CAR22-8 | TRSSGSIASNYVQ | 529 | EDNQRPS | 568 | QSYDSSNPWV | 607 |
| CAR22-9 | SGSSSNIGSNYVY | 530 | RNNQRPS | 569 | AAWDDSLSGPV | 608 |
| CAR22-10 | TGTSSDVGGYNYVS | 531 | DVSNRPS | 570 | SSYTSSSTLVYV | 609 |
| CAR22-11 | QGDSLRSYYAS | 532 | GKNHRPS | 571 | HSRDSSGNHL | 610 |
| CAR22-12 | TGTSSDVGGYNYVS | 533 | DVSNRPS | 572 | SSYTSSSTLYV | 611 |
| CAR22-13 | TGSSGSFASSYVQ | 534 | EDNQRPS | 573 | QSYDGATWV | 612 |
| CAR22-14 | SGTSSDVGGYNSVS | 535 | DVNNRPS | 574 | SSYTSSSTLF | 613 |
| CAR22-15 | QGDSLRTYYAT | 536 | DENNRPS | 575 | SSRDSSGNPSCV | 614 |
| CAR22-16 | TGTSSDVGGYNYVS | 537 | DVSNRPS | 576 | SSYTSSSTWV | 615 |
| CAR22-17 | RSSQSLLAGNGHNYLD | 538 | LGSNRAS | 577 | MQALQNPLT | 616 |
| CAR22-18 | TGSSSDVGGYNYVS | 539 | EVSNRPS | 578 | SSYTSSSTLV | 617 |
| CAR22-19 | TGTSSDVGGYNYVS | 540 | DVSNRPS | 579 | SSYASSSTLV | 618 |
| CAR22-20 | TGTNSDVGRYNYVS | 541 | EVSYRPS | 580 | SSYTTSSTLD | 619 |
| CAR22-21 | TGTSSDVGGYKYVS | 542 | DVSNRPS | 581 | SSYTSSSTLV | 620 |
| CAR22-22 | TLSSGHSSYAIA | 543 | VNSDGSLSKGD | 582 | QTWGSGMAI | 621 |
| CAR22-23 | TGTSSDVGGYNYVS | 544 | EVSKRPS | 583 | SSYTSSGTLV | 622 |
| CAR22-24 | QGDSLRSYYAS | 545 | GKNNRPS | 584 | NSRDSSGNPYV | 623 |
| CAR22-25 | TGTSSDVGGYNYVS | 546 | EVSNRPS | 585 | SSYTSSSTLV | 624 |
| CAR22-26 | RSSQSLLHSNGYNYLD | 547 | LGSNRAS | 586 | MQALQTPPWT | 625 |
| CAR22-27 | RSSQSLLHSNGYNYLD | 548 | LGSNRAS | 587 | MQVLQTPPLT | 626 |
| CAR22-28 | GGTNIGSKNVH | 549 | YDSDRPS | 588 | QVWDSSSDHWV | 627 |
| CAR22-29 | GGHNIRSKNVH | 550 | YDGDRPS | 589 | QVWDSDSDHYV | 628 |
| CAR22-30 | RASQSINTYLN | 551 | AASNLQS | 590 | QQSYSSLLT | 629 |
| CAR22-31 | TGTSSDVGGYNYVS | 552 | DADKRPS | 591 | CSYAGGSTWV | 630 |
| CAR22-32 | RASQSVTSNLA | 553 | AASTRAT | 592 | QQYHTWPPLT | 631 |
| CAR22-33 | RSSQSLLHSNGYNYLD | 554 | LGSNRAS | 593 | MQALQTPWT | 632 |
| CAR22-34 | RSSQSLLYSDGYNYLD | 555 | LGSNRAS | 594 | MQALQTQS | 633 |
| CAR22-35 | QGDSLRSYFTS | 556 | GNNNRPS | 595 | DSRDSSGDHLV | 634 |
| CAR22-36 | QGDSLRSYYAS | 557 | GKNNRPS | 596 | NSRDSSGNHPVV | 635 |
| CAR22-37 | TGTSSDVGGYKHVS | 558 | DVSNRPS | 597 | VSYRNFNSLV | 636 |
| CAR22-38 | TGTSSDVGGYNYVS | 559 | EVSNRPS | 598 | SSYTSSSTLV | 637 |

TABLE 8B
Light Chain Variable Domain CDRs of CD22 CARs.
The LC CDR sequences in this table have the same
sequence under the Kabat or combined definitions.

| | | | | SEQ | | SEQ |
|---|---|---|---|---|---|---|
| | | SEQ | | ID | | ID |
| Candidate | LCDR1 | ID NO: | LCDR2 | NO: | LCDR3 | NO: |
| CAR22-53 | TGTSSDVGGYNYVS | 638 | EVNNRPS | 649 | SSYTSGRTLYV | 660 |
| Kabat | | | | | | |
| CAR22-53 | TSSDVGGYNY | 639 | EVN | 650 | YTSGRTLY | 661 |
| Chothia | | | | | | |
| CAR22-53 | TGTSSDVGGYNYVS | 1117 | EVNNRPS | 1119 | SSYTSGRTLYV | 1121 |
| Combined | | | | | | |
| CAR22-53 | SSDVGGYNY | 1118 | EVN | 1120 | SSYTSGRTLYV | 1122 |
| IMGT | | | | | | |
| CAR22-57 | TGSRNDIGAYESVS | 640 | GVNNRPS | 651 | SSHTTTSTLYV | 662 |
| Combined | | | | | | |
| CAR22-58 | TGSSSDVGGYNSVS | 641 | EVINRPS | 652 | SSYTSSSTYV | 663 |
| Combined | | | | | | |
| CAR22-59 | TGSSSDIGGFNYVS | 642 | EVTNRPS | 653 | SSYASGSPLYV | 664 |
| Combined | | | | | | |
| CAR22-60 | TGTSSDIGGYNYVS | 643 | EVSNRPS | 654 | SSYTSSSTLYV | 665 |
| Combined | | | | | | |
| CAR22-61 | TGTSSDVGGYNYVS | 644 | EVSNRPS | 655 | SSYTSSSTLYV | 666 |
| Combined | | | | | | |
| CAR22-62 | TGTSSDVGGYNYVS | 645 | DVSNRPS | 656 | SSYTSSSTLYV | 667 |
| Combined | | | | | | |
| CAR22-63 | TGTSSDVGGYNYVS | 646 | EVSNRPS | 657 | SSYTSSSTLYI | 668 |
| Combined | | | | | | |
| CAR22-64 | TGTSSDVGGYNYVS | 647 | DVSNRPS | 658 | SSYTSSSTLYV | 669 |
| Combined | | | | | | |
| CAR22-65 | TGTSSDVGGYNYVS | 648 | DVSNRPS | 659 | SSYTSSSTLYV | 670 |
| Combined | | | | | | |

TABLE 9A
Heavy Chain Variable Regions of CD22 antibody molecules

| Candidate | ID | Heavy Chain Variable region |
|---|---|---|
| m971 | 700 | QVQLQQSGPGLVKPSQTLSLTCAISGDSVSSNSAAWNWIRQSPSRGLEWLGRTYYRSKW |
| | | YNDYAVSVKSRITINPDTSKNQFSLQLNSVTPEDTAVYYCAREVTGDLEDAFDIWGQGTM |
| | | VTV |
| CAR22-1 | 701 | QVQLVQSGGGLIQPGGSLRLSCAASGFTVSSNYMSWVRQAPGKGLEWVSVIYSGGSTYY |
| | | ADSVKGRFTISRDNSKNTLYLQMNSLRAEDTAVYYCASQSTPYDSSGYYSGDAFDIWGQ |
| | | GTMVTV |
| CAR22-2 | 702 | EVQLQQSGPGLVKPSQTLSLTCAISGDSVSSNSAAWNWIRQSPSRGLEWLGRTYYRSKW |
| | | YNDYAVSVKSRITINPDTSKNQFSLQLNSVTPEDTAVYYCARDLGWIAVAGTFDYWGQG |
| | | TLVTV |
| CAR22-3 | 703 | EVQLQQSGPGLVKPSQTLSLTCAISGDSVLSNSDTWNWIRQSPSRGLEWLGRTYHRSTWY |
| | | DDYASSVRGRVSINVDTSKNQYSLQLNAVTPEDTGAYYCARDRLQDGNSWSDAFDVWG |
| | | QGTMVTV |
| CAR22-4 | 704 | EVQLVESGGGLVQPGRSLRLSCAASGFTFDDYAMHWVRQAPGKGLEWVSGISWNSGSIG |
| | | YADSVKGRFTISRDNAKNSLYLQMNSLRAEDTALYYCAKGLSSWHFHDALDIWGQGTM |
| | | VTV |
| CAR22-5 | 705 | EVQLVESGGGLVQPGRSLRLSCAASGFTFDDYAMHWVRQAPGKGLEWVSGISWNSGSIG |
| | | YADSVKGRFTISRDNAKNSLYLQMNSLRAEDTALYYCAKDKGGGYYDFWSGSDYWGQ |
| | | GTLVTV |
| CAR22-6 | 706 | EVQLQQSGPGLVKPSLTLSLTCAISGDSVSSNSATWTWIRQSPSRGLEWLGRTYYRSTWY |
| | | NDYAVSVKSRITINPDTSKNQFSLQLNSVTPEDTAVYYCAREGSGSYYAYWGQGTLVTV |
| CAR22-7 | 707 | QVQLVQSGAEVKKPGASVKVSCKASGYTFTGYYMHWVRQAPGQGLEWMGWINP- |
| | | NSGGTNYAQKFQGRVTMTRDTSISTAYMELSRLRSDDTAVYYCARDYWGYYGSGTLDY |
| | | WGQGTLVTV |
| CAR22-8 | 708 | QVQLVQSGAEVKKPGASVKVSCKASGYTFTSYGISWVRQAPGQGLEWMGWISAYNGNT |
| | | NYAQKLQGRVTMTTDTSTSTAYMELRSLRSDDTAVYYCARAGLALYSNYVPYYYYGM |
| | | DVWGQGTTVTV |
| CAR22-9 | 709 | EVQLVESGGGLVKPGGSLRLSCVASGFTFSNAWMNWVRQAPGKGLEWVGRIKSKTDGG |
| | | TADYAAPVKGRFTISRDDSKNTMYLQMNSLKTEDTGVYYCITGATDVWGQGTTVTV |
| CAR22-10 | 710 | EVQLQQSGPGLVKPSQTLSLTCAISGDSVLSNSDTWNWIRQSPSRGLEWLGRTYHRSTWY |
| | | DDYASSVRGRVSINVDTSKNQYSLQLNAVTPEDTGVYYCARDRLQDGNSWSDAFDVWG |
| | | QGTMVTV |
| CAR22-11 | 711 | EVQLQQSGPGLVKPSQTLSLTCAISGDSVSSNSAAWNWIRQSPSRGLEWLGRTYYRSKW |
| | | YNDYAVSVKSRITINPDTSKNQFSLQLNSVTPEDTAVYYCAREESSSGWYEGNWFDPWG |
| | | QGTLVTV |
| CAR22-12 | 712 | EVQLQQSGPGLVKPSQTLSLTCAISGDSVLSNSDTWNWIRQSPSRGLEWLGRTYHRSTWY |
| | | DDYASSVRGRVSINVDTSKNQYSLQLNAVTPEDTGVYYCARDRLQDGNSWSDAFDVWG |
| | | QGTMVTV |
| CAR22-13 | 713 | QVQLQESGPGLVKPSETLSLTCTVSGGSISSSSYYWGWIRQPPGKGLEWIGSIYYSGSTYY |
| | | NPSLKSRVTISVDTSKNQFSLKLSSVTAADTAVYYCARGRMDTAMAQIWGQGTMVTV |
| CAR22-14 | 714 | QVQLVQSGAEVKKPGASVKVSCKASGYTFTSYYMHWVRQAPGQGLEWMGIINPSGGST |
| | | SYAQKFQGRVTMTRDTSTSTVYMELSSLRSEDTAVYYCARDLDVSLDIWGQGTMVTV |
| CAR22-15 | 715 | EVQLVESGGGLVQPGGSLRLSCAASGFTFSSYAMHWVRQAPGKGLEYVSAISSNGGSTY |
| | | YANSVKDRFTISRDNSKNTLYLQMGSLRAEDMAVYYCARVHSSGYYHPGPNDYWGQGT |
| | | LVTV |
| CAR22-16 | 716 | EVQLVESGAEVKKPGASVKVSCKASGYTFTSYYMHWVRQAPGQGLEWMGIINPSGGSTS |
| | | YAQKFQGRVTMTRDTSTSTAYMELSSLRSEDTAVYYCAREAGVVAVDYWGQGTLVTV |
| CAR22-17 | 717 | QVQLVQSGGGVVQPGRSLRLSCAASGFTFSSYAMSWVRQAPGKGLEWVSAISGSGGSTY |
| | | YADSVKGRFTISRDNSKNTLYLQMNSLRAEDTAVYYCAKEPLFGVVEEDVDYWGQGTL |
| | | VTV |
| CAR22-18 | 718 | QVQLVQSGAEVKKPGASVKVSCKASGYTFTSYYMHWVRQAPGQGLEWMGIINPSGGST |
| | | SYAQKFQGRVTMTRDTSTSTVYMELSSLRSEDTAVYYCARGSGSLGDAFDIWGQGTMVTV |
| CAR22-19 | 719 | QVQLVQSGAEVKKPGASVKVSCKASGYTFTSYYMHWVRQAPGQGLEWMGIINPSGGST |
| | | SYAQKFQGRVTMTRDTSTSTVYMELSSLRSEDTAVYYCARDGFGELSGAFDIWGQGTMV |
| | | TV |
| CAR22-20 | 720 | EVQLVESGAEVKKPGASVKVSCKASGYTFTSYYMHWVRQAPGQGLEWMGIINPSGGSTS |
| | | YAQKFQGRVTMTRDTSTSTVYMELSSLRSEDTAVYYCARGPIGCSGGSCLDYWGQGTLV |
| | | TV |
| CAR22-21 | 721 | QVQLVQSGAEVKKPGASVKVSCKASGYTFTSYYMHWVRQAPGQGLEWMGIINPSGGST |
| | | SYAQKFQGRVTMTRDTSTSTVYMELSSLRSEDTAVYYCARGSYGDYGDAFDIWGQGTT |
| | | VTV |
| CAR22-22 | 722 | EVQLVESGAEVKKPGSSVKVSCKASGGTFSSYAISWVRQAPGQGLEWMGGIIPIFGTANY |
| | | AQKFQGRVTITADESTSTAYMELSSLRSEDTAVYYCARDHKVVRFGYWGQGTLVTV |
| CAR22-23 | 723 | QVQLVQSGAEVKKPGASVKVSCKASGYTFTSYYMHWVRQAPGQGLEWMGIINPSGGST |
| | | SYAQKFQGRVTMTRDTSTSTVYMELSSLRSEDTAVYYCARGDYYMDVWGKGTTVTV |
| CAR22-24 | 724 | EVQLVESGGGLVQPGGSLRLSCAASGFTFSSYAMSWVRQAPGKGLEWVSYISSSSSTIYY |
| | | ADSVKGRFTISRDNAKNSLYLQMNSLRAEDTAVYYCARDGPIRYFDHSKAFDIWGQGTM |
| | | VTV |
| CAR22-25 | 725 | QVQLVQSGAEVKKPGASVKVSCKASGYTFTSYYMHWVRQAPGQGLEWMGIINPSGGST |
| | | SYAQKFQGRVTMTRDTSISTAYMELSRLRSDDTAVYYCAREMDDSSGPDYWGQGTLVTV |
| CAR22-26 | 726 | EVQLVESGAEVKKPGESLKISCKGSGYSFTGSWIGWGRQMPGKGLEWMGIIYPGDSDTR |
| | | YSPSFQGQVTISADKSISTAYLQWSSLKASDTAMYYCARGFLRGGDCCGALDIWGQGTM |
| | | VTV |
| CAR22-27 | 727 | QVQLQESGPGLVKPSETLSLTCSVSGGSINSYYWSWIRQAPGKGLEWIAFTSHSGNVKYN |
| | | PSLTGRVTIAVDTSKNQFYLEVTSVTAADTAVYFCARGLDPLFAYDAFEIWGLGTMVTV |
| CAR22-28 | 728 | EVQLVESGGGLVKPGGSLRLSCAASGFTFSDYYMSWIRQAPGKGLEWVSYISSSGSTIYY |
| | | ADSVKGRFTISRDNAKNSLYLQMNSLRAEDTAVYYCARDDFWSGSVDYWGQGTLVTV |
| CAR22-29 | 729 | QVQLVQSGAEVKKPGASVKVSCKASGYTFTSYYMHWVRQAPGQGLEWMGIINPSGGST |
| | | SYAQKFQGRVTMTRDTSTSTVYMELSSLRSEDTAVYYCAREDDSSGYTSPFDYWGQGTL |
| | | VTV |
| CAR22-30 | 730 | EVQLVESGAEVKKPGASVKVSCKASGYTFTGYYMHWVRQAPGQGLEWMGWINPNSGG |
| | | TNYAQKFQGRVTMTRDTSISTAYMELSRLRSDDTAVYYCAREPASSSWYGYYYYMDVW |
| | | GKGTLVTV |
| CAR22-31 | 731 | QVQLVQSGAEVKKPGASVKVSCKASGYTFTSYDINWVRQATGQGLEWMGWMNPNSGN |
| | | TGYAQKFQGRVTMTRNTSISTAYMELSSLRSEDTAVYYCARG- |
| | | DSNYWSYYGMDVWGQGTLVTV |
| CAR22-32 | 732 | QVQLVQSGAEVKKPGASVKVSCKASGYTFTSYGISWVRQAPGQGLEWMGWISAYNGNT |
| | | NYAQKLQGRVTMTTDTSTSTAYMELRSLRSDDTAVYYCASFSSSDSYDYWGQGTLVTV |
| CAR22-33 | 733 | QVNLRESGPALVKPTQTLTLTCTFSGFSLNTFGMSVSWIRQPPGKALEWLALIDWDDDKY |
| | | YSTSLRTRLTISKDTAKNQVVLRMTNMDPMDTATYYCARIYGGDRTNTQAPYFFDLWG |
| | | QGTLVTV |
| CAR22-34 | 734 | QVQLQESGPGLVKPSGTLSLTCAVSGASITSRHWWNWVRHSPGKGLEWIGQIYHSGTTT |
| | | YNPSLGSRVTISVDKSKNQISLELRSVTAADTATYYCVRDYLELATYYGMDVWGQGTTV |
| | | TV |
| CAR22-35 | 735 | QVQLVQSGAEVKKPGASVKVSCKASGYTFTSYYMHWVRQAPGQGLEWMGIINPSGGST |
| | | SYAQKFQGRVTMTRDTSTSTVYMELSSLRSEDTAVYYCARDLAAAGNYYYYGMDVWG |
| | | QGTTVTV |
| CAR22-36 | 736 | QVQLVQSGAEVKKPGASVKVSCKASGYTFTSYYMHWVRQAPGQGLEWMGIINPSGGST |
| | | SYAQKFQGRVTMTRDTSTSTVYMELSSLRSEDTAVYYCARDDDFWSGSGAFDIWGQGTT |
| | | VTV |
| CAR22-37 | 737 | QVQLVQSGAEVKKPGASVKVSCKASGYTFTSYYMHWVRQAPGQGLEWMGIINPSGGST |
| | | SYAQKFQGRVTMTRDTSTSTVYMELSSLRSEDTAVYYCARPEGVSYYDSSVLDYWGQG |
| | | TLVTV |
| CAR22-38 | 738 | QVQLVQSGAEVKKPGASVKVSCKASGYTFTSYYMHWVRQAPGQGLEWMGIINPSGGST |
| | | SYAQKFQGRVTMTRDTSTSTVYMELSSLRAEDTAVYYCARGGYGDYLDAFDIWGQGTT |
| | | VTV |

TABLE 9B
Heavy Chain Variable Regions of CD22 antibody molecules

| | SEQ | |
|---|---|---|
| | ID | |
| Candidate | NO: | Heavy Chain Variable region |
| CAR22-53 | 671 | EVQLQQSGPGLVKPSQTLSLTCAISGDSVSSNSAAWNWIRQSPSRGLEWLGRTYYRSKW |
| | | YSDYAVSVKSRITINPDTSKNQFSLQLNSVTPEDTAVYYCARDPYDFWSGYPDAFDIWGQ |
| | | GTMVTVSS |
| CAR22-57 | 672 | EVQLQQSGPGLVKPSQTLSLTCAISGDSVSNNNAAWNWIRQSPSRGLEWLGRTYHRSTW |
| | | YNDYVGSVKSRITINPDTSKNQFSLQLNSVTPEDTAVYYCARETDYGDYGAFDIWGQGTT |
| | | VTVSS |
| CAR22-58 | 673 | EVQLQQSGPGLVNPSQTLSITCAISGDSVSSNSAAWNWIRQSPSRGLEWLGRTFYRSKWY |
| | | NDYAVSVKGRITISPDTSKNQFSLQLNSVTPEDTAVYYCAGGDYYYGLDVWGQGTTVTV |
| | | SS |
| CAR22-59 | 674 | EVQLQQSGPGLVKPSQTLSLTCAISGDSVLSNSDTWNWIRQSPSRGLEWLGRTYHRSTWY |
| | | DDYASSVRGRVSINVDTSKNQYSLQLNAVTPEDTGVYYCARDRLQDGNSWSDAFDVWG |
| | | QGTMVTVSS |
| CAR22-60 | 675 | EVQLQQSGPGLVKPSQTLSLTCAISGDSVLSNSDTWNWIRQSPSRGLEWLGRTYHRSTWY |
| | | DDYASSVRGRVSINVDTSKNQYSLQLNAVTPEDTGVYYCARDRLQDGNSWSDAFDVWG |
| | | QGTMVTVSS |
| CAR22-61 | 676 | QVQLQESGPGLVKPSQTLSLTCAISGDSVLSNSDTWNWIRQSPSRGLEWLGRTYHRSTWY |
| | | DDYASSVRGRVSINVDTSKNQYSLQLNAVTPEDTGVYYCARDRLQDGNSWSDAFDVWG |
| | | QGTMVTVSS |
| CAR22-62 | 677 | EVQLQQSGPGLVKPSQTLSLTCAISGDSVLSNSDTWNWIRQSPSRGLEWLGRTYHRSTWY |
| | | DDYASSVRGRVSINVDTSKNQYSLQLNAVTPEDTGVYYCARDRLQDGNSWSDAFDVWG |
| | | QGTMVTVSS |
| CAR22-63 | 678 | EVQLQQSGPGLVKPSQTLSLTCAISGDSVLSNSDTWNWIRQSPSRGLEWLGRTYHRSTWY |
| | | DDYASSVRGRVSINVDTSKNQYSLQLNAVTPEDTGVYYCARDRLQDGNSWSDAFDVWG |
| | | QGTMVTVSS |
| CAR22-64 | 679 | EVQLQQSGPGLVKPSQTLPLTCAISGDSVLSNSDTWNWIRQSPSRGLEWLGRTYHRSTWY |
| | | DDYASSVRGRVSINVDTSKNQYSLQLNAVTPEDTGVYYCARVRLQDGNSWSDAFDVWG |
| | | QGTMVTVSS |
| CAR22-65 | 680 | EVQLQQSGPGLVKPSQTLSLTCAISGDSMLSNSDTWNWIRQSPSRGLEWLGRTYHRSTW |
| | | YDDYASSVRGRVSINVDTSKNQYSLQLNAVTPEDTGVYYCARVRLQDGNSWSDAFDVW |
| | | GQGTMVTVSS |

TABLE 10A
Light Chain Variable Regions of CD22 antibody molecules

| Candidate | ID | Light Chain Variable region |
|---|---|---|
| m971 | 739 | DIQMTQSPSSLSASVGDRVTITCRASQTIWSYLNWYQQRPGKAPNLLIYAASSLQSGVPSR |
| | | FSGRGSGTDFTLTISSLQAEDFATYYCQQSYSIPQTFGQGTKLEIK |
| CAR22-1 | 740 | SYVLTQPPSASGTPGQRVTISCSGSSSNIGSNYVYWYQQLPGTAPKLLIYRNNQRPSGVPD |
| | | RFSGSKSGTSASLAISGLRSEDEADYYCAAWDDSLSGYVFGTGTKLTVL |
| CAR22-2 | 741 | QSALTQPASVSGSPGQSITISCTGTSSDVGGYNYVSWYQQHPGKAPKLMIYDVSKRPSGV |
| | | SNRFSGSKSGNTASLTISGLQAEDEADYYCSSYTSSSLNHVFGTGTKVTVL |
| CAR22-3 | 742 | QSALTQPASVSGSPGQSITISCTGTSSDVGGYNYVSWYQQHPGKAPKLMIYDVSNRPSGV |
| | | SNRFSGSKSGNTASLTISGLQAEDEADYYCSSYTSSSTPYVFGTGTQLTVL |
| CAR22-4 | 743 | SSELTQDPAVSVALGQTVRITCQGDSLRSYYASWYQQKPGQAPVLVIYGKNNRPSGIPDR |
| | | FSGSSSGNTASLTITGAQAEDEADYYCNSRDSSGNHLWVFGGGTKLTVL |
| CAR22-5 | 744 | SSELTQDPAVSVALGQTVRITCQGDSLRSYYASWYQQKPGQAPVLVIYGKNNRPSGIPDR |
| | | FSGSSSGNTASLTITGAQAEDEADYYCNSRDSSGWVFGGGTKLTVL |
| CAR22-6 | 745 | QSALTQPASVSGSPGQSITISCTGTSSDVGGYNYVSWYQQHPGKAPKLMIYDVSNRPSGV |
| | | SNRFSGSKSGNTASLTISGLQAEDEADYYCSSYTSSSTLYVFGTGTKVTVL |
| CAR22-7 | 746 | QSALTQPGSVSGSPGQSITISCTGTSSDVGGYNYVSWYQQHPGKAPKLIIYDVSSRPSGVS |
| | | NRFSGSQSGNTASLTISGLQAEDEADYSCSSYAGSNTLVFGTGTKVTVL |
| CAR22-8 | 747 | NFMLTQPHSVSESPGKTVTISCTRSSGSIASNYVQWYQQRPGSSPTTVIYEDNQRPSGVPD |
| | | RFSGSIDSSSNSASLTISGLKTEDEADYYCQSYDSSNPWVFGGGTKLTVL |
| CAR22-9 | 748 | SYVLTQPPSASGTPGQRVTISCSGSSSNIGSNYVYWYQQLPGTAPKLLIYRNNQRPSGVPD |
| | | RFSGSKSGTSASLAISGLRSEDEADYYCAAWDDSLSGPVFGGGTKLTVL |
| CAR22-10 | 749 | QSALTQPASVSGSPGQSITISCTGTSSDVGGYNYVSWYQQHPGKAPKLMIYDVSNRPSGV |
| | | SNRFSGSKSGNTASLTISGLQAEDEADYYCSSYTSSSTLVYVFGTGTKVTVL |
| CAR22-11 | 750 | SSELTQDPAVSVALGQTVRITCQGDSLRSYYASWYQQKPGQAPVLVIYGKNHRPSGIPDR |
| | | FSGSSSGDTDSLTITGAQAEDEADYYCHSRDSSGNHLFGGGTKLTVL |
| CAR22-12 | 751 | QSALTQPASASGSPGQSVTISCTGTSSDVGGYNYVSWYQQHPGKAPKLMIYDVSNRPSGV |
| | | SNRFSGSKSGNTASLTISGLQAEDEADYYCSSYTSSSTLYVFGTGTQLTVL |
| CAR22-13 | 752 | NFMLTQPHSVSESPGKTVTIPCTGSSGSFASSYVQWYQQRPGSAPATVIYEDNQRPSGVPD |
| | | RFSGSVDSSSNSASLTISGLKTEDEAVYYCQSYDGATWVFGGGTKLTVL |
| CAR22-14 | 753 | QSALTQPASVSGSPGQSITISCSGTSSDVGGYNSVSWYQQYPGKAPKLMIYDVNNRPSGV |
| | | SSRFSGSKSGNTASLTISGLQAEDEADYYCSSYTSSSTLFFGAGTKVTVL |
| CAR22-15 | 754 | SSELTQDPAVSVALGQTVRITCQGDSLRTYYATWYQQKPGQAPVLVFYDENNRPSGIPDR |
| | | FSGSSSGNTASLTITGTQAEDEADYYCSSRDSSGNPSCVFGGGTKLTVL |
| CAR22-16 | 755 | QSALTQPASVSGSPGQSITISCTGTSSDVGGYNYVSWYQQHPGKAPKLMIYDVSNRPSGV |
| | | SNRFSGSKSGNTASLTISGLQAEDEADYYCSSYTSSSTWVFGGGTKLTVL |
| CAR22-17 | 756 | DVVMTQSPLSLPVTPGEPASISCRSSQSLLAGNGHNYLDWYLQKPGQSPQLLIYLGSNRAS |
| | | GVPDRFSGSGSGTDFTLKISRVEAEDVGVYYCMQALQNPLTFGGGTKLEIKR |
| CAR22-18 | 757 | QSALTQPASVSGSPGQSITISCTGSSSDVGGYNYVSWYQQHPGKAPKLMIYEVSNRPSGVS |
| | | NRFSGSKSGNTASLTISGLQAEDEADYYCSSYTSSSTLVFGTGTKVTVL |
| CAR22-19 | 758 | QSALTQPASVSGSPGQSITISCTGTSSDVGGYNYVSWYQQHPGKAPKLMIYDVSNRPSGV |
| | | SNRFSGSKSGNTASLTISGLQAEDEADYYCSSYASSSTLVFGGGTKVTVL |
| CAR22-20 | 759 | QSALTQPAYVSGSPGQSITISCTGTNSDVGRYNYVSWYQQHPGKAPKLMIYEVSYRPSGV |
| | | SNRFSGSKSGNTASLTISGLQAEDEADYYCSSYTTSSTLDFGTGTKVTVL |
| CAR22-21 | 760 | QSALTQPASVSGSPGQSITISCTGTSSDVGGYKYVSWYQQHPGKAPKLMIYDVSNRPSGV |
| | | SNRFSGSKSGNTASLTISGLQAEDEADYYCSSYTSSSTLVFGGGTKLTVL |
| CAR22-22 | 761 | HVILTQPPSASASLGASVKLTCTLSSGHSSYAIAWHQQQPEKGPRYLMKVNSDGSLSKGD |
| | | GIPDRFSGSTSGAERYLTISSLQSEDEADYYCQTWGSGMAIFGGGTKLTVL |
| CAR22-23 | 762 | QSALTQPASASGSPGQSVTISCTGTSSDVGGYNYVSWYQQHPGKAPKLMIYEVSKRPSGV |
| | | PDRFSGSKSGNTASLTISGLQAEDEADYYCSSYTSSGTLVFGGGTKLTVL |
| CAR22-24 | 763 | SSELTQDPAVSVALGQTVRITCQGDSLRSYYASWYQQKPGQAPVLVIYGKNNRPSGIPDR |
| | | FSGSSSGNTASLTITGAQAEDEADYYRNSRDSSGNPYVFGTGTKVTVL |
| CAR22-25 | 764 | QSALTQPASVSGSPGQSITISCTGTSSDVGGYNYVSWYQQHPGKAPKLMIYEVSNRPSGVS |
| | | NRFSGSKSGNTASLTISGLQAEDEADYYCSSYTSSSTLVFGTGTKLTVL |
| CAR22-26 | 765 | DIVMTQSPLSLPVTPGEPASISCRSSQSLLHSNGYNYLDWYLQKPGQSPQLLIYLGSNRAS |
| | | GVPDRFSGSGSGTDFTLKISRVEAEDVGVYYCMQALQTPPWTFGQGTKLEIKR |
| CAR22-27 | 766 | EIVLTQSPLSLPVTPGEPASISCRSSQSLLHSNGYNYLDWYLQKPGQSPQLLIYLGSNRASG |
| | | VPDRFSGSGSGTDFTLKISRVEAEDVGVYYCMQVLQTPPLTFGGGTKVDIKR |
| CAR22-28 | 767 | SYVLTQPPSVSVAPGKTATITCGGTNIGSKNVHWYQQKPGQAPVLAIYYDSDRPSGIPERF |
| | | SGSNSGNTATLTISRVEAGDEADYFCQVWDSSSDH-WVFGGGTKLTVL |
| CAR22-29 | 768 | SYELTQPPSVSVAPGETASIACGGHNIRSKNVHWYQQKPGQAPVLVISYDGDRPSGIPERF |
| | | SGSNLGSTATLTISRVEAGDEADYYCQVWDSDSDH-YVFGTGTKVTVL |
| CAR22-30 | 769 | DIQMTQSPSSLSASVGDRVTITCRASQSINTYLNWYQQKPGKPPKLLIYAASNLQSGVPSR |
| | | FSGSGSGTHFTLTISSLQPDDFATYYCQQSYSSLLTFGGGTKLEIK |
| CAR22-31 | 770 | QSVLTQPRSVSGSPGQSVTISCTGTSSDVGGYNYVSWYQQHPGEAPKLIIYDADKRPSGIS |
| | | NRFSSGKSGNTASLTISGLQVEDEADYYCCSYAGGSTWVFGGGTKVTVL |
| CAR22-32 | 771 | EIVLTQSPATLSVSPGERATLSCRASQSVTSNLAWYQQKPGQAPRLLIYAASTRATGIPAR |
| | | FSGSGSGTEFTLTISSMQSEDFAVYFCQQYHTWPPLTFGGGTKVEIKT |
| CAR22-33 | 772 | DVVMTQSPLSLPVTPGEPASISCRSSQSLLHSNGYNYLDWYLQKPGQSPQLLIYLGSNRAS |
| | | GVPDRFSGSGSGTDFTLKISRVEAEDVGVYYCMQALQTPWTFGQGTKLEIK |
| CAR22-34 | 773 | EIVLTQSPLSLPVTPGEPASISCRSSQSLLYSDGYNYLDWYLQKPGQSPQLLIYLGSNRASG |
| | | VPDRFSGSGSGTDFTLQISGVETEDVGVYYCMQALQTQSFGQGTKLEIK |
| CAR22-35 | 774 | SSELTQDPAVSVALGQTARITCQGDSLRSYFTSWYHQKPGQAPVLVIYGNNNRPSGIPDRF |
| | | SGSSSGNTASLTITGAQAEDEGDYYCDSRDSSGDHLVFGGGTKLTVL |
| CAR22-36 | 775 | SSELTQDPAVSVALGQTVRITCQGDSLRSYYASWYQQKPGQAPVLVIYGKNNRPSGIPDR |
| | | FSGSSSGNTASLTITGAQAEDEADYYCNSRDSSGNHPVVFGGGTKLTVL |
| CAR22-37 | 776 | QSALTQPASVSGSPGQSITISCTGTSSDVGGYKHVSWYQHHPGKAPKLMIYDVSNRPSGV |
| | | SNRFSGSKSGNTASLTVSGLQAEDEAHYYCVSYRNFNSLVFGTGTKVTVL |
| CAR22-38 | 777 | QSALTQPASVSGSPGQSITISCTGTSSDVGGYNYVSWYQQHPGKAPKLMIYEVSNRPSGVS |
| | | NRFSGSKSGNTASLTISGLQAEDEADYYCSSYTSSSTLVFGTGTQLTVL |

TABLE 10B
Light Chain Variable Regions of CD22 antibody molecules

| Candidate | ID | Light Chain Variable region |
|---|---|---|
| CAR22-53 | 681 | QSALTQPASVSGSPGQSITISCTGTSSDVGGYNYVSWYQQHPGKAPKVIISEVNNRPSGVS |
| | | HRFSGSKSGNTASLTISGLQAEDEADYFCSSYTSGRTLYVFGTGSKVTVLG |
| CAR22-57 | 682 | QSALTQPASVSGSPGQSITISCTGSRNDIGAYESVSWYQQHPGNAPKLIIHGVNNRPSGVFD |
| | | RFSVSQSGNTASLTISGLQAEDEADYYCSSHTTTSTLYVFGTGTKVTVLG |
| CAR22-58 | 683 | QSALTQPASVSGSPGQSITISCTGSSSDVGGYNSVSWYQQHPGKAPKLMIYEVINRPSGVS |
| | | HRFSGSKSGNTASLTISGLQAEDEADYYCSSYTSSSTYVFGTGTKVTVLG |
| CAR22-59 | 684 | QSALTQPASVSGSPGQSITISCTGSSSDIGGFNYVSWYQQHAGEAPKLMIYEVTNRPSGVS |
| | | DRFSGSKSDNTASLTISGLQAEDEADYYCSSYASGSPLYVFGTGTKVTVLG |
| CAR22-60 | 685 | QSALTQPASVSGSPGQSITFSCTGTSSDIGGYNYVSWYQQHPGKAPKLMIYEVSNRPSGVS |
| | | NRFSGTKSGNTASLTISGLQAEDEADYYCSSYTSSSTLYVFGTGTKLTVLG |
| CAR22-61 | 686 | QSALTQPASVSGSPGQSITISCTGTSSDVGGYNYVSWYQQHPGKAPKLMIYEVSNRPSGVS |
| | | NRFSGSKSGNTASLTISGLQAEDEADYYCSSYTSSSTLYVFGTGTKVTVLG |
| CAR22-62 | 687 | QSALTQPASVSGSPGQSITISCTGTSSDVGGYNYVSWYQQHPGKAPKLMIYDVSNRPSGV |
| | | SNRFSGSKSGNTASLTISGLQAEDEADYYCSSYTSSSTLYVFGTGTKVTVLG |
| CAR22-63 | 688 | QSALTQPASVSGSPGQSITISCTGTSSDVGGYNYVSWYQQHPGKAPKLMIYEVSNRPSGVS |
| | | NRFSGSKSGNTASLTISGLQAEDEADYYCSSYTSSSTLYIFGTGTKVTVLG |
| CAR22-64 | 689 | QSALTQPASASGSPGQSVTISCTGTSSDVGGYNYVSWYQQHPGKAPKLMIYDVSNRPSGV |
| | | SNRFSGSKSGNTASLTISGLQAEDEADYYCSSYTSSSTLYVFGTGTQLTVL |
| CAR22-65 | 690 | QSALTQPASASGSPGQSVTISCTGTSSDVGGYNYVSWYQQHPGKAPKLMIYDVSNRPSGV |
| | | SNRFSGSKSGNTASLTISGLQAEDEADYYCSSYTSSSTLYVFGTGTQLTVL |

[1283] In some embodiments, the antigen binding domain comprises a HC CDR1, a HC CDR2, and a HC CDR3 of any heavy chain binding domain amino acid sequences listed in Table 9A or 9B. In embodiments, the antigen binding domain further comprises a LC CDR1, a LC CDR2, and a LC CDR3. In embodiments, the antigen binding domain comprises a LC CDR1, a LC CDR2, and a LC CDR3 of any light chain binding domain amino acid sequences listed in Table 10A or 10B.

[1284] In some embodiments, the antigen binding domain comprises one, two or all of LC CDR1, LC CDR2, and LC CDR3 of any light chain binding domain amino acid sequences listed in Table 10A or 10B, and one, two or all of HC CDR1, HC CDR2, and HC CDR3 of any heavy chain binding domain amino acid sequences listed in Table 9A or 9B.

[1285] In some embodiments, the CDRs are defined according to the Kabat numbering scheme, the Chothia numbering scheme, or a combination thereof.

[1286] The order in which the VL and VH domains appear in the scFv can be varied (i.e., VL-VH, or VH-VL orientation), and where either three or four copies of the “G4S” (SEQ ID NO:18) subunit, in which each subunit comprises the sequence GGGGS (SEQ ID NO:18) (e.g., (G4S)₃ (SEQ ID NO:107) or (G4S)₄ (SEQ ID NO:106)), can connect the variable domains to create the entirety of the scFv domain. Alternatively, the CAR construct can include, for example, a linker including the sequence GSTSGSGKPGSGEGSTKG (SEQ ID NO: 1322).

[1287] These clones all contained a Q/K residue change in the signal domain of the co-stimulatory domain derived from CD3zeta chain.

### CAR20 Constructs

[1288] Anti-CD20 single chain variable fragments were isolated. See Table 11A and 11B. Anti-CD20 scFvs were cloned into lentiviral CAR expression vectors with the CD3zeta chain and the 4-1BB costimulatory molecule. CAR-containing plasmids were amplified by bacterial transformation in STBL3 cells, followed by Maxiprep using endotoxin-free Qiagen Plasmid Maki kit. Lentiviral supernatant was produced in 293T cells using standard techniques.

[1289] The sequences of the CARs are provided below in Tables 11A and 11B. Additional components of CARs (e.g., leader, hinge, transmembrane, and signalling domains) are described herein.

TABLE 11A
Rat CD20 CAR Constructs

| | SEQ ID | |
|---|---|---|
| Name | NO: | Sequence |
| CAR20-1 | 800 | qiqlvqsgpelkkpgesvkiscktseytftdyafhwvkqapgkglkwmgwintysgkpt |
| scFv | | yaddfkgrfvfsledsartanlqisnlknedtatyfcargayygyrdwftywgqgtlvtvssg |
| domain | | gggsggggsggggsggggsdivmtqtpssqavsagekvtmsckssqsllysenkknyla |
| | | wyqqkpgqspklliywastresgvpdrfigsgsgtdftltissvqaedlavyycqqyynfp |
| | | pwtfgggtklelk |
| CAR20-1 | 801 | caaattcaactggtccagtccggccctgagctgaagaagccgggagaatccgtgaagatctc |
| scFv | | ctgcaagacctcggagtacaccttcactgactacgccttccactgggtcaagcaggcacctgg |
| domain nt | | gaaaggcctgaagtggatgggctggatcaacacttactcggggaagccaacctacgccgat |
| | | gatttcaagggaagattcgtgtttagcctggaggactccgcccggacagctaacctccaaatct |
| | | ccaaccttaagaacgaggacactgcgacctacttctgcgcgcggggagcctattacggttatc |
| | | gcgactggttcacctactggggacagggcaccctcgtgaccgtgtcctccggcggtggagg |
| | | ctcaggggggggcggctcgggagggggtggaagcggaggaggaggctccgatattgtgat |
| | | gacccagaccccgtcgagccaggcagtgtccgctggagaaaaggtcaccatgtcctgcaag |
| | | agctcacagtccctgttgtactccgaaaacaagaagaattacctggcctggtaccagcagaag |
| | | cccggacagtcccctaaactgctgatctactgggcctcgactagggaatctggcgtgcccgac |
| | | cgctttatcggaagcggttcagggactgacttcaccctgaccattagcagcgtgcaggccgag |
| | | gacctggcggtgtactactgtcaacagtactacaacttcccgccctggactttcggcggtggaa |
| | | cgaagctcgaactcaag |
| CAR20-1 | 802 | atggccctccctgtcaccgccctgctgcttccgctggctcttctgctccacgccgctcggcccc |
| Soluble | | aaattcaactggtccagtccggccctgagctgaagaagccgggagaatccgtgaagatctcct |
| scFv-nt | | gcaagacctcggagtacaccttcactgactacgccttccactgggtcaagcaggcacctggg |
| | | aaaggcctgaagtggatgggctggatcaacacttactcggggaagccaacctacgccgatga |
| | | tttcaagggaagattcgtgtttagcctggaggactccgcccggacagctaacctccaaatctcc |
| | | aaccttaagaacgaggacactgcgacctacttctgcgcgcggggagcctattacggttatcgc |
| | | gactggttcacctactggggacagggcaccctcgtgaccgtgtcctccggcggtggaggctc |
| | | aggggggggcggctcgggagggggtggaagcggaggaggaggctccgatattgtgatga |
| | | cccagaccccgtcgagccaggcagtgtccgctggagaaaaggtcaccatgtcctgcaagag |
| | | ctcacagtccctgttgtactccgaaaacaagaagaattacctggcctggtaccagcagaagcc |
| | | cggacagtcccctaaactgctgatctactgggcctcgactagggaatctggcgtgcccgacc |
| | | gctttatcggaagcggttcagggactgacttcaccctgaccattagcagcgtgcaggccgagg |
| | | acctggcggtgtactactgtcaacagtactacaacttcccgccctggactttcggcggtggaac |
| | | gaagctcgaactcaagggatcgcaccaccatcaccatcatcatcac |
| CAR20-1 | 803 | malpvtalllplalllhaarpqiqlvqsgpelkkpgesvkiscktseytftdyafhwvkqapg |
| Soluble | | kglkwmgwintysgkptyaddfkgrfvfsledsartanlqisnlknedtatyfcargayyg |
| scFv-aa | | yrdwftywgqgtlvtvssggggsggggsggggsggggsdivmtqtpssqavsagekvt |
| | | msckssqsllysenkknylawyqqkpgqspklliywastresgvpdrfigsgsgtdftltis |
| | | svqaedlavyycqqyynfppwtfgggtklelkgshhhhhhhh |
| CAR20-1 | 804 | atggccctccctgtcaccgccctgctgcttccgctggctcttctgctccacgccgctcggcccc |
| Full-nt | | aaattcaactggtccagtccggccctgagctgaagaagccgggagaatccgtgaagatctcct |
| lentivirus | | gcaagacctcggagtacaccttcactgactacgccttccactgggtcaagcaggcacctggg |
| | | aaaggcctgaagtggatgggctggatcaacacttactcggggaagccaacctacgccgatga |
| | | tttcaagggaagattcgtgtttagcctggaggactccgcccggacagctaacctccaaatctcc |
| | | aaccttaagaacgaggacactgcgacctacttctgcgcgcggggagcctattacggttatcgc |
| | | gactggttcacctactggggacagggcaccctcgtgaccgtgtcctccggcggtggaggctc |
| | | aggggggggcggctcgggagggggtggaagcggaggaggaggctccgatattgtgatga |
| | | cccagaccccgtcgagccaggcagtgtccgctggagaaaaggtcaccatgtcctgcaagag |
| | | ctcacagtccctgttgtactccgaaaacaagaagaattacctggcctggtaccagcagaagcc |
| | | cggacagtcccctaaactgctgatctactgggcctcgactagggaatctggcgtgcccgacc |
| | | gctttatcggaagcggttcagggactgacttcaccctgaccattagcagcgtgcaggccgagg |
| | | acctggcggtgtactactgtcaacagtactacaacttcccgccctggactttcggcggtggaac |
| | | gaagctcgaactcaagaccactaccccagcaccgaggccacccaccccggctcctaccatc |
| | | gcctcccagcctctgtccctgcgtccggaggcatgtagacccgcagctggtggggccgtgca |
| | | tacccggggtcttgacttcgcctgcgatatctacatttgggcccctctggctggtacttgcgggg |
| | | tcctgctgctttcactcgtgatcactctttactgtaagcgcggtcggaagaagctgctgtacatctt |
| | | taagcaacccttcatgaggcctgtgcagactactcaagaggaggacggctgttcatgccggtt |
| | | cccagaggaggaggaaggcggctgcgaactgcgcgtgaaattcagccgcagcgcagatgc |
| | | tccagcctacaagcaggggcagaaccagctctacaacgaactcaatcttggtcggagagag |
| | | gagtacgacgtgctggacaagcggagaggacgggacccagaaatgggcgggaagccgc |
| | | gcagaaagaatccccaagagggcctgtacaacgagctccaaaaggataagatggcagaag |
| | | cctatagcgagattggtatgaaaggggaacgcagaagaggcaaaggccacgacggactgta |
| | | ccagggactcagcaccgccaccaaggacacctatgacgctcttcacatgcaggccctgccg |
| | | cctcgg |
| CAR20-1- | 805 | malpvtalllplalllhaarpqiqlvqsgpelkkpgesvkiscktseytftdyafhwvkqapg |
| Full-aa | | kglkwmgwintysgkptyaddfkgrfvfsledsartanlqisnlknedtatyfcargayyg |
| | | yrdwftywgqgtlvtvssggggsggggsggggsggggsdivmtqtpssqavsagekvt |
| | | msckssqsllysenkknylawyqqkpgqspklliywastresgvpdrfigsgsgtdftltis |
| | | svqaedlavyycqqyynfppwtfgggtklelktttpaprpptpaptiasqplslrpeacrpaa |
| | | ggavhtrgldfacdiyiwaplagtcgvlllslvitlyckrgrkkllyifkqpfmrpvqttqeed |
| | | gcscrfpeeeeggcelrvkfsrsadapaykqgqnqlynelnlgrreeydvldkrrgrdpem |
| | | ggkprrknpqeglynelqkdkmaeayseigmkgerrrgkghdglyqglstatkdtydal |
| | | hmqalppr |
| CAR20-2 | 806 | evqlvesggglvqpgrslklsclasgftfskygmnwirqapgkglewvasisstsiyiyyad |
| scFv | | tvkgrftisrenakntlylqmtslrsedtalyycarhdyssysywgqgvmvtvssggggsg |
| domain | | gggsggggsggggsqvvltqpksvstslestvklsckinsgnigsyfihwyqqhegrsptt |
| | | miyrddkrphgvpdrfsgsidsssnsafltinnvqtedeaiyfchsydsginivfgggtkltvl |
| CAR20-2 | 807 | gaggtgcagctcgtcgaatccggtggaggactggtgcagccaggaagatccctgaagctgt |
| scFv | | cctgtctcgcctcgggcttcactttctccaaatacggcatgaattggattcgccaggcacccgg |
| domain-nt | | aaaggggctggaatgggtggccagcatcagctcgactagcatctacatctactatgccgatac |
| | | cgtcaagggccgcttcactatctcccgcgagaacgctaagaacaccctttacttgcaaatgacc |
| | | tccctgaggtccgaagataccgccctgtactattgcgcccggcacgactactcatcctactcct |
| | | actggggacagggagtcatggtgaccgtgtcctccggcggtggaggctcaggggggggcg |
| | | gctcgggagggggtggaagcggaggaggaggctcccaagtcgtgctgacgcaacccaagt |
| | | ccgtgagcaccagcctggagagcaccgtgaagctcagctgcaagattaactcgggcaacatt |
| | | gggtcctacttcatccattggtaccagcagcacgaaggacggtcccctaccactatgatctacc |
| | | gggacgacaagcggccgcacggagtgccggacagattctcgggttcaatcgattcctcatct |
| | | aactcggcgtttctcaccatcaacaacgtgcagaccgaggacgaagcgatctacttctgccac |
| | | tcctacgactcgggtattaacattgtgttcggcggcgggactaagctgacagtgctg |
| CAR20-2- | 808 | atggccctccctgtcaccgccctgctgcttccgctggctcttctgctccacgccgctcggcccg |
| Soluble | | aggtgcagctcgtcgaatccggtggaggactggtgcagccaggaagatccctgaagctgtcc |
| scFv-nt | | tgtctcgcctcgggcttcactttctccaaatacggcatgaattggattcgccaggcacccggaa |
| | | aggggctggaatgggtggccagcatcagctcgactagcatctacatctactatgccgataccg |
| | | tcaagggccgcttcactatctcccgcgagaacgctaagaacaccctttacttgcaaatgacctc |
| | | cctgaggtccgaagataccgccctgtactattgcgcccggcacgactactcatcctactcctac |
| | | tggggacagggagtcatggtgaccgtgtcctccggcggtggaggctcaggggggggcggc |
| | | tcgggagggggtggaagcggaggaggaggctcccaagtcgtgctgacgcaacccaagtcc |
| | | gtgagcaccagcctggagagcaccgtgaagctcagctgcaagattaactcgggcaacattgg |
| | | gtcctacttcatccattggtaccagcagcacgaaggacggtcccctaccactatgatctaccgg |
| | | gacgacaagcggccgcacggagtgccggacagattctcgggttcaatcgattcctcatctaac |
| | | tcggcgtttctcaccatcaacaacgtgcagaccgaggacgaagcgatctacttctgccactcct |
| | | acgactcgggtattaacattgtgttcggcggcgggactaagctgacagtgctgggatcgcacc |
| | | accatcaccatcatcatcac |
| CAR20-2- | 809 | malpvtalllplalllhaarpevqlvesggglvqpgrslklsclasgftfskygmnwirqapg |
| Soluble | | kglewvasisstsiyiyyadtvkgrftisrenakntlylqmtslrsedtalyycarhdyssysy |
| scFv-aa | | wgqgvmvtvssggggsggggsggggsggggsqvvltqpksvstslestvklsckinsgn |
| | | igsyfihwyqqhegrspttmiyrddkrphgvpdrfsgsidsssnsafltinnvqtedeaiyf |
| | | chsydsginivfgggtkltvlgshhhhhhhh |
| CAR20-2- | 810 | atggccctccctgtcaccgccctgctgcttccgctggctcttctgctccacgccgctcggcccg |
| Full-nt | | aggtgcagctcgtcgaatccggtggaggactggtgcagccaggaagatccctgaagctgtcc |
| | | tgtctcgcctcgggcttcactttctccaaatacggcatgaattggattcgccaggcacccggaa |
| | | aggggctggaatgggtggccagcatcagctcgactagcatctacatctactatgccgataccg |
| | | tcaagggccgcttcactatctcccgcgagaacgctaagaacaccctttacttgcaaatgacctc |
| | | cctgaggtccgaagataccgccctgtactattgcgcccggcacgactactcatcctactcctac |
| | | tggggacagggagtcatggtgaccgtgtcctccggcggtggaggctcaggggggggcggc |
| | | tcgggagggggtggaagcggaggaggaggctcccaagtcgtgctgacgcaacccaagtcc |
| | | gtgagcaccagcctggagagcaccgtgaagctcagctgcaagattaactcgggcaacattgg |
| | | gtcctacttcatccattggtaccagcagcacgaaggacggtcccctaccactatgatctaccgg |
| | | gacgacaagcggccgcacggagtgccggacagattctcgggttcaatcgattcctcatctaac |
| | | tcggcgtttctcaccatcaacaacgtgcagaccgaggacgaagcgatctacttctgccactcct |
| | | acgactcgggtattaacattgtgttcggcggcgggactaagctgacagtgctgaccactaccc |
| | | cagcaccgaggccacccaccccggctcctaccatcgcctcccagcctctgtccctgcgtccg |
| | | gaggcatgtagacccgcagctggtggggccgtgcatacccggggtcttgacttcgcctgcga |
| | | tatctacatttgggcccctctggctggtacttgcggggtcctgctgctttcactcgtgatcactcttt |
| | | actgtaagcgcggtcggaagaagctgctgtacatctttaagcaacccttcatgaggcctgtgca |
| | | gactactcaagaggaggacggctgttcatgccggttcccagaggaggaggaaggcggctgc |
| | | gaactgcgcgtgaaattcagccgcagcgcagatgctccagcctacaagcaggggcagaacc |
| | | agctctacaacgaactcaatcttggtcggagagaggagtacgacgtgctggacaagcggag |
| | | aggacgggacccagaaatgggcgggaagccgcgcagaaagaatccccaagagggcctgt |
| | | acaacgagctccaaaaggataagatggcagaagcctatagcgagattggtatgaaagggga |
| | | acgcagaagaggcaaaggccacgacggactgtaccagggactcagcaccgccaccaagg |
| | | acacctatgacgctcttcacatgcaggccctgccgcctcgg |
| CAR20-2- | 811 | malpvtalllplalllhaarpevqlvesggglvqpgrslklsclasgftfskygmnwirqapg |
| Full-aa | | kglewvasisstsiyiyyadtvkgrftisrenakntlylqmtslrsedtalyycarhdyssysy |
| | | wgqgvmvtvssggggsggggsggggsggggsqvvltqpksvstslestvklsckinsgn |
| | | igsyfihwyqqhegrspttmiyrddkrphgvpdrfsgsidsssnsafltinnvqtedeaiyf |
| | | chsydsginivfgggtkltvltttpaprpptpaptiasqplslrpeacrpaaggavhtrgldfac |
| | | diyiwaplagtcgvlllslvitlyckrgrkkllyifkqpfmrpvqttqeedgcscrfpeeeegg |
| | | celrvkfsrsadapaykqgqnqlynelnlgrreeydvldkrrgrdpemggkprrknpqeg |
| | | lynelqkdkmaeayseigmkgerrrgkghdglyqglstatkdtydalhmqalppr |
| CAR20-3 | 812 | evqlvesggglvqpgrslklscaasgftfrdyymawvrqapkkglewvasisyegnpyy |
| scFv | | gdsvkgrftisrnnakstlylqmnslrsedtatyycarhdhnnvdwfaywgqgtlvtvssg |
| domain | | gggsggggsggggsggggsdivmtqtpssqavsagekvtmsckssqsllysenkknyla |
| | | wyqqkpgqspkllifwastresgvpdrfigsgsgtdftltissvqaedlavyycqqyynfpt |
| | | fgsgtkleik |
| CAR20-3 | 813 | gaagtgcagcttgtggagtctggcggcggtctggtgcagccgggaagatccctgaagctgtc |
| scFv | | atgcgccgcgtccgggtttaccttccgcgattactacatggcctgggtcagacaggcacctaa |
| domain nt | | gaaggggctggaatgggtggcatccatctcatatgaaggaaacccgtactacggagactcgg |
| | | tgaaaggccgcttcactatctcacggaacaacgctaagagcacgctgtacttgcaaatgaact |
| | | ccctccggtcggaggacacagccacttactactgtgcccggcacgaccataacaacgtcgatt |
| | | ggttcgcctactggggtcaaggaaccctcgtgaccgtgtcctccggcggtggaggctcaggg |
| | | gggggcggctcgggagggggtggaagcggaggaggaggctccgacatcgtgatgactca |
| | | gactccaagcagccaggccgtgtccgccggagagaaagtcaccatgtcgtgcaagagctcc |
| | | cagtccctgctgtactccgaaaacaagaagaattatctcgcctggtaccagcagaagcctgga |
| | | cagtccccgaagctcctgatcttttgggcgtcgaccagggaatccggcgtgcccgatcgcttc |
| | | attggctccggttccggcaccgacttcaccctgaccattagcagcgtccaggcggaggacct |
| | | ggctgtgtactactgccaacagtactacaacttccccactttcggatcggggaccaagctgga |
| | | gatcaag |
| CAR20-3- | 814 | atggccctccctgtcaccgccctgctgcttccgctggctcttctgctccacgccgctcggcccg |
| Soluble | | aagtgcagcttgtggagtctggcggcggtctggtgcagccgggaagatccctgaagctgtca |
| scFv-nt | | tgcgccgcgtccgggtttaccttccgcgattactacatggcctgggtcagacaggcacctaag |
| | | aaggggctggaatgggtggcatccatctcatatgaaggaaacccgtactacggagactcggt |
| | | gaaaggccgcttcactatctcacggaacaacgctaagagcacgctgtacttgcaaatgaactc |
| | | cctccggtcggaggacacagccacttactactgtgcccggcacgaccataacaacgtcgatt |
| | | ggttcgcctactggggtcaaggaaccctcgtgaccgtgtcctccggcggtggaggctcaggg |
| | | gggggcggctcgggagggggtggaagcggaggaggaggctccgacatcgtgatgactca |
| | | gactccaagcagccaggccgtgtccgccggagagaaagtcaccatgtcgtgcaagagctcc |
| | | cagtccctgctgtactccgaaaacaagaagaattatctcgcctggtaccagcagaagcctgga |
| | | cagtccccgaagctcctgatcttttgggcgtcgaccagggaatccggcgtgcccgatcgcttc |
| | | attggctccggttccggcaccgacttcaccctgaccattagcagcgtccaggcggaggacct |
| | | ggctgtgtactactgccaacagtactacaacttccccactttcggatcggggaccaagctgga |
| | | gatcaagggatcgcaccaccatcaccatcatcatcac |
| CAR20-3- | 815 | malpvtalllplalllhaarpevqlvesggglvqpgrslklscaasgftfrdyymawvrqap |
| Soluble | | kkglewvasisyegnpyygdsvkgrftisrnnakstlylqmnslrsedtatyycarhdhnn |
| scFv-aa | | vdwfaywgqgtlvtvssggggsggggsggggsggggsdivmtqtpssqavsagekvt |
| | | msckssqsllysenkknylawyqqkpgqspkllifwastresgvpdrfigsgsgtdftltiss |
| | | vqaedlavyycqqyynfptfgsgtkleikgshhhhhhhh |
| CAR20-3- | 816 | atggccctccctgtcaccgccctgctgcttccgctggctcttctgctccacgccgctcggcccg |
| Full-nt | | aagtgcagcttgtggagtctggcggcggtctggtgcagccgggaagatccctgaagctgtca |
| | | tgcgccgcgtccgggtttaccttccgcgattactacatggcctgggtcagacaggcacctaag |
| | | aaggggctggaatgggtggcatccatctcatatgaaggaaacccgtactacggagactcggt |
| | | gaaaggccgcttcactatctcacggaacaacgctaagagcacgctgtacttgcaaatgaactc |
| | | cctccggtcggaggacacagccacttactactgtgcccggcacgaccataacaacgtcgatt |
| | | ggttcgcctactggggtcaaggaaccctcgtgaccgtgtcctccggcggtggaggctcaggg |
| | | gggggcggctcgggagggggtggaagcggaggaggaggctccgacatcgtgatgactca |
| | | gactccaagcagccaggccgtgtccgccggagagaaagtcaccatgtcgtgcaagagctcc |
| | | cagtccctgctgtactccgaaaacaagaagaattatctcgcctggtaccagcagaagcctgga |
| | | cagtccccgaagctcctgatcttttgggcgtcgaccagggaatccggcgtgcccgatcgcttc |
| | | attggctccggttccggcaccgacttcaccctgaccattagcagcgtccaggcggaggacct |
| | | ggctgtgtactactgccaacagtactacaacttccccactttcggatcggggaccaagctgga |
| | | gatcaagaccactaccccagcaccgaggccacccaccccggctcctaccatcgcctcccag |
| | | cctctgtccctgcgtccggaggcatgtagacccgcagctggtggggccgtgcatacccggg |
| | | gtcttgacttcgcctgcgatatctacatttgggcccctctggctggtacttgcggggtcctgctgc |
| | | tttcactcgtgatcactctttactgtaagcgcggtcggaagaagctgctgtacatctttaagcaac |
| | | ccttcatgaggcctgtgcagactactcaagaggaggacggctgttcatgccggttcccagagg |
| | | aggaggaaggcggctgcgaactgcgcgtgaaattcagccgcagcgcagatgctccagccta |
| | | caagcaggggcagaaccagctctacaacgaactcaatcttggtcggagagaggagtacgac |
| | | gtgctggacaagcggagaggacgggacccagaaatgggcgggaagccgcgcagaaaga |
| | | atccccaagagggcctgtacaacgagctccaaaaggataagatggcagaagcctatagcga |
| | | gattggtatgaaaggggaacgcagaagaggcaaaggccacgacggactgtaccagggact |
| | | cagcaccgccaccaaggacacctatgacgctcttcacatgcaggccctgccgcctcgg |
| CAR20-3- | 817 | malpvtalllplalllhaarpevqlvesggglvqpgrslklscaasgftfrdyymawvrqap |
| Full-aa | | kkglewvasisyegnpyygdsvkgrftisrnnakstlylqmnslrsedtatyycarhdhnn |
| | | vdwfaywgqgtlvtvssggggsggggsggggsggggsdivmtqtpssqavsagekvt |
| | | msckssqsllysenkknylawyqqkpgqspkllifwastresgvpdrfigsgsgtdftltiss |
| | | vqaedlavyycqqyynfptfgsgtkleiktttpaprpptpaptiasqplslrpeacrpaagga |
| | | vhtrgldfacdiyiwaplagtcgvlllslvitlyckrgrkkllyifkqpfmrpvqttqeedgcs |
| | | crfpeeeeggcelrvkfsrsadapaykqgqnqlynelnlgrreeydvldkrrgrdpemgg |
| | | kprrknpqeglynelqkdkmaeayseigmkgerrrgkghdglyqglstatkdtydalhm |
| | | qalppr |
| CAR20-4 | 818 | qvtlkesgpgilqpsqtlsltctftrfslstygmsvgwirqpsgkglewladiwwdddkhyn |
| scFv | | pslknrltiskdtsknqaflkitnvdtadtatyycarssttdgivtyvmdvwgqgasvtvssg |
| domain | | gggsggggsggggsggggsdvqmtqspsllsasvgdavtinckasqninrylnwyqqkl |
| | | gegprlliysanslqtgipsrfsgsgsgadftltitspqpedvatyfclqhnswpltfgsgtkleik |
| CAR20-4 | 819 | caagtcacgctgaaggaatcgggccctggaattctgcagccaagccagaccctctcgcttact |
| scFv | | tgcaccttcacccgcttctcactgtccacttacggaatgtccgtgggatggattcggcagccca |
| domain nt | | gcggaaagggtttggagtggctggccgacatttggtgggatgacgacaagcattacaaccct |
| | | agcctgaagaatcggctcaccatcagcaaagacacctccaagaaccaggcgttcctgaagat |
| | | caccaacgtggataccgccgacactgcaacatactattgtgcccgctcctcaaccaccgatgg |
| | | gatcgtgacctacgtgatggacgtctggggccagggagcttccgtgaccgtgtcctccggcg |
| | | gtggaggctcaggggggggcggctcgggagggggtggaagcggaggaggaggctccga |
| | | cgtgcagatgactcagtccccgtcgctcctgtccgcctccgtcggcgacgccgtgactattaa |
| | | ctgcaaggcgtcccagaacatcaatcggtacctgaactggtaccagcaaaaactgggagaag |
| | | ggccgagacttctcatctactccgccaactccctgcaaactggcatcccgtcgaggttcagcg |
| | | gatcaggctctggtgccgacttcactttgaccatcacgagccctcagcccgaagatgtggcca |
| | | cctacttctgcctccaacacaactcctggcccctgacctttggttcgggcaccaagctggagat |
| | | caag |
| CAR20-4- | 820 | atggccctccctgtcaccgccctgctgcttccgctggctcttctgctccacgccgctcggcccc |
| Soluble | | aagtcacgctgaaggaatcgggccctggaattctgcagccaagccagaccctctcgcttactt |
| scFv-nt | | gcaccttcacccgcttctcactgtccacttacggaatgtccgtgggatggattcggcagcccag |
| | | cggaaagggtttggagtggctggccgacatttggtgggatgacgacaagcattacaacccta |
| | | gcctgaagaatcggctcaccatcagcaaagacacctccaagaaccaggcgttcctgaagatc |
| | | accaacgtggataccgccgacactgcaacatactattgtgcccgctcctcaaccaccgatggg |
| | | atcgtgacctacgtgatggacgtctggggccagggagcttccgtgaccgtgtcctccggcggt |
| | | ggaggctcaggggggggcggctcgggagggggtggaagcggaggaggaggctccgac |
| | | gtgcagatgactcagtccccgtcgctcctgtccgcctccgtcggcgacgccgtgactattaact |
| | | gcaaggcgtcccagaacatcaatcggtacctgaactggtaccagcaaaaactgggagaagg |
| | | gccgagacttctcatctactccgccaactccctgcaaactggcatcccgtcgaggttcagcgg |
| | | atcaggctctggtgccgacttcactttgaccatcacgagccctcagcccgaagatgtggccac |
| | | ctacttctgcctccaacacaactcctggcccctgacctttggttcgggcaccaagctggagatc |
| | | aagggatcgcaccaccatcaccatcatcatcac |
| CAR20-4- | 821 | malpvtalllplalllhaarpqvtlkesgpgilqpsqtlsltctftrfslstygmsvgwirqpsgk |
| Soluble | | glewladiwwdddkhynpslknrltiskdtsknqaflkitnvdtadtatyycarssttdgivt |
| scFv-aa | | yvmdvwgqgasvtvssggggsggggsggggsggggsdvqmtqspsllsasvgdavti |
| | | nckasqninrylnwyqqklgegprlliysanslqtgipsrfsgsgsgadftltitspqpedvat |
| | | yfclqhnswpltfgsgtkleikgshhhhhhhh |
| CAR20-4- | 822 | atggccctccctgtcaccgccctgctgcttccgctggctcttctgctccacgccgctcggcccc |
| Full-nt | | aagtcacgctgaaggaatcgggccctggaattctgcagccaagccagaccctctcgcttactt |
| | | gcaccttcacccgcttctcactgtccacttacggaatgtccgtgggatggattcggcagcccag |
| | | cggaaagggtttggagtggctggccgacatttggtgggatgacgacaagcattacaacccta |
| | | gcctgaagaatcggctcaccatcagcaaagacacctccaagaaccaggcgttcctgaagatc |
| | | accaacgtggataccgccgacactgcaacatactattgtgcccgctcctcaaccaccgatggg |
| | | atcgtgacctacgtgatggacgtctggggccagggagcttccgtgaccgtgtcctccggcggt |
| | | ggaggctcaggggggggcggctcgggagggggtggaagcggaggaggaggctccgac |
| | | gtgcagatgactcagtccccgtcgctcctgtccgcctccgtcggcgacgccgtgactattaact |
| | | gcaaggcgtcccagaacatcaatcggtacctgaactggtaccagcaaaaactgggagaagg |
| | | gccgagacttctcatctactccgccaactccctgcaaactggcatcccgtcgaggttcagcgg |
| | | atcaggctctggtgccgacttcactttgaccatcacgagccctcagcccgaagatgtggccac |
| | | ctacttctgcctccaacacaactcctggcccctgacctttggttcgggcaccaagctggagatc |
| | | aagaccactaccccagcaccgaggccacccaccccggctcctaccatcgcctcccagcctct |
| | | gtccctgcgtccggaggcatgtagacccgcagctggtggggccgtgcatacccggggtcttg |
| | | acttcgcctgcgatatctacatttgggcccctctggctggtacttgcggggtcctgctgctttcac |
| | | tcgtgatcactctttactgtaagcgcggtcggaagaagctgctgtacatctttaagcaacccttca |
| | | tgaggcctgtgcagactactcaagaggaggacggctgttcatgccggttcccagaggagga |
| | | ggaaggcggctgcgaactgcgcgtgaaattcagccgcagcgcagatgctccagcctacaag |
| | | caggggcagaaccagctctacaacgaactcaatcttggtcggagagaggagtacgacgtgct |
| | | ggacaagcggagaggacgggacccagaaatgggcgggaagccgcgcagaaagaatccc |
| | | caagagggcctgtacaacgagctccaaaaggataagatggcagaagcctatagcgagattg |
| | | gtatgaaaggggaacgcagaagaggcaaaggccacgacggactgtaccagggactcagc |
| | | accgccaccaaggacacctatgacgctcttcacatgcaggccctgccgcctcgg |
| CAR20-4- | 823 | malpvtalllplalllhaarpqvtlkesgpgilqpsqtlsltctftrfslstygmsvgwirqpsgk |
| Full-aa | | glewladiwwdddkhynpslknrltiskdtsknqaflkitnvdtadtatyycarssttdgivt |
| | | yvmdvwgqgasvtvssggggsggggsggggsggggsdvqmtqspsllsasvgdavti |
| | | nckasqninrylnwyqqklgegprlliysanslqtgipsrfsgsgsgadftltitspqpedvat |
| | | yfclqhnswpltfgsgtkleiktttpaprpptpaptiasqplslrpeacrpaaggavhtrgldfa |
| | | cdiyiwaplagtcgvlllslvitlyckrgrkkllyifkqpfmrpvqttqeedgcscrfpeeeeg |
| | | gcelrvkfsrsadapaykqgqnqlynelnlgrreeydvldkrrgrdpemggkprrknpqe |
| | | glynelqkdkmaeayseigmkgerrrgkghdglyqglstatkdtydalhmqalppr |
| CAR20-5 | 824 | evqlvesggglvqpgtslklscvasgftfsssgmqwirqapkkglewisgiyydsykksy |
| scFv | | adsvkgrftisrdnskntlylemnslrsedtatyycaksayygykdyfdywgqgvmvtvs |
| domain | | sggggsggggsggggsggggsdiqmtqsppslsaslgdkvtitcqasqninkyiawyqq |
| | | kpgkaprllirytstlesgtpsrfsgsgsgrdysfsisnvesgdvasyyclqyddlpytfgpgt |
| | | klelk |
| CAR20-5 | 825 | gaggtccagcttgtggaatcaggaggcggactcgtccagccgggtactagcctgaagctcag |
| scFv | | ctgtgtggccagcggttttaccttctcgtcctccgggatgcagtggattcggcaggctcccaag |
| domain nt | | aagggactggaatggatctcgggcatctactacgactcgtacaagaagtcctacgccgattcc |
| | | gtgaaaggtcgcttcaccatctcccgggacaacagcaagaacactctgtacctcgagatgaac |
| | | tccttgcgctccgaggataccgcaacctattactgcgccaagtcggcctactacggctacaag |
| | | gactacttcgactattggggccagggagtgatggtgaccgtgtcctccggcggtggaggctc |
| | | aggggggggcggctcgggagggggtggaagcggaggaggaggctccgacatccaaatg |
| | | acacagtcacccccttctctttccgcgagcctgggagataaggtcaccattacgtgccaagcgt |
| | | cccagaacatcaacaagtacatcgcctggtaccagcagaaaccgggaaaggccccgcggct |
| | | gctgattagatacacctcgactctggaatccggcactccatcaagattcagcggctccggcag |
| | | cgggagggactactcgttctccatctccaatgtggagtccggggacgtggccagctactattg |
| | | cctgcaatacgacgatctgccctacaccttcggacctggaaccaagctggaactcaag |
| CAR20-5- | 826 | atggccctccctgtcaccgccctgctgcttccgctggctcttctgctccacgccgctcggcccg |
| Soluble | | aggtccagcttgtggaatcaggaggcggactcgtccagccgggtactagcctgaagctcagc |
| scFv-nt | | tgtgtggccagcggttttaccttctcgtcctccgggatgcagtggattcggcaggctcccaaga |
| | | agggactggaatggatctcgggcatctactacgactcgtacaagaagtcctacgccgattccg |
| | | tgaaaggtcgcttcaccatctcccgggacaacagcaagaacactctgtacctcgagatgaact |
| | | ccttgcgctccgaggataccgcaacctattactgcgccaagtcggcctactacggctacaagg |
| | | actacttcgactattggggccagggagtgatggtgaccgtgtcctccggcggtggaggctca |
| | | ggggggggcggctcgggagggggtggaagcggaggaggaggctccgacatccaaatga |
| | | cacagtcacccccttctctttccgcgagcctgggagataaggtcaccattacgtgccaagcgtc |
| | | ccagaacatcaacaagtacatcgcctggtaccagcagaaaccgggaaaggccccgcggct |
| | | gctgattagatacacctcgactctggaatccggcactccatcaagattcagcggctccggcag |
| | | cgggagggactactcgttctccatctccaatgtggagtccggggacgtggccagctactattg |
| | | cctgcaatacgacgatctgccctacaccttcggacctggaaccaagctggaactcaagggatc |
| | | gcaccaccatcaccatcatcatcac |
| CAR20-5- | 827 | malpvtalllplalllhaarpevqlvesggglvqpgtslklscvasgftfsssgmqwirqapk |
| Soluble | | kglewisgiyydsykksyadsvkgrftisrdnskntlylemnslrsedtatyycaksayygy |
| scFv-aa | | kdyfdywgqgvmvtvssggggsggggsggggsggggsdiqmtqsppslsaslgdkvti |
| | | tcqasqninkyiawyqqkpgkaprllirytstlesgtpsrfsgsgsgrdysfsisnvesgdva |
| | | syyclqyddlpytfgpgtklelkgshhhhhhhh |
| CAR20-5- | 828 | atggccctccctgtcaccgccctgctgcttccgctggctcttctgctccacgccgctcggcccg |
| Full-nt | | aggtccagcttgtggaatcaggaggcggactcgtccagccgggtactagcctgaagctcagc |
| | | tgtgtggccagcggttttaccttctcgtcctccgggatgcagtggattcggcaggctcccaaga |
| | | agggactggaatggatctcgggcatctactacgactcgtacaagaagtcctacgccgattccg |
| | | tgaaaggtcgcttcaccatctcccgggacaacagcaagaacactctgtacctcgagatgaact |
| | | ccttgcgctccgaggataccgcaacctattactgcgccaagtcggcctactacggctacaagg |
| | | actacttcgactattggggccagggagtgatggtgaccgtgtcctccggcggtggaggctca |
| | | ggggggggcggctcgggagggggtggaagcggaggaggaggctccgacatccaaatga |
| | | cacagtcacccccttctctttccgcgagcctgggagataaggtcaccattacgtgccaagcgtc |
| | | ccagaacatcaacaagtacatcgcctggtaccagcagaaaccgggaaaggccccgcggct |
| | | gctgattagatacacctcgactctggaatccggcactccatcaagattcagcggctccggcag |
| | | cgggagggactactcgttctccatctccaatgtggagtccggggacgtggccagctactattg |
| | | cctgcaatacgacgatctgccctacaccttcggacctggaaccaagctggaactcaagacca |
| | | ctaccccagcaccgaggccacccaccccggctcctaccatcgcctcccagcctctgtccctg |
| | | cgtccggaggcatgtagacccgcagctggtggggccgtgcatacccggggtcttgacttcgc |
| | | ctgcgatatctacatttgggcccctctggctggtacttgcggggtcctgctgctttcactcgtgat |
| | | cactctttactgtaagcgcggtcggaagaagctgctgtacatctttaagcaacccttcatgaggc |
| | | ctgtgcagactactcaagaggaggacggctgttcatgccggttcccagaggaggaggaagg |
| | | cggctgcgaactgcgcgtgaaattcagccgcagcgcagatgctccagcctacaagcagggg |
| | | cagaaccagctctacaacgaactcaatcttggtcggagagaggagtacgacgtgctggacaa |
| | | gcggagaggacgggacccagaaatgggcgggaagccgcgcagaaagaatccccaagag |
| | | ggcctgtacaacgagctccaaaaggataagatggcagaagcctatagcgagattggtatgaa |
| | | aggggaacgcagaagaggcaaaggccacgacggactgtaccagggactcagcaccgcca |
| | | ccaaggacacctatgacgctcttcacatgcaggccctgccgcctcgg |
| CAR20-5- | 829 | malpvtalllplalllhaarpevqlvesggglvqpgtslklscvasgftfsssgmqwirqapk |
| Full-aa | | kglewisgiyydsykksyadsvkgrftisrdnskntlylemnslrsedtatyycaksayygy |
| | | kdyfdywgqgvmvtvssggggsggggsggggsggggsdiqmtqsppslsaslgdkvti |
| | | tcqasqninkyiawyqqkpgkaprllirytstlesgtpsrfsgsgsgrdysfsisnvesgdva |
| | | syyclqyddlpytfgpgtklelktttpaprpptpaptiasqplslrpeacrpaaggavhtrgld |
| | | facdiyiwaplagtcgvlllslvitlyckrgrkkllyifkqpfmrpvqttqeedgcscrfpeee |
| | | eggcelrvkfsrsadapaykqgqnqlynelnlgrreeydvldkrrgrdpemggkprrknp |
| | | qeglynelqkdkmaeayseigmkgerrrgkghdglyqglstatkdtydalhmqalppr |
| CAR20-6 | 830 | qvtlkesgpgllqpsqtlsltctfagfslnthgmgvgwirqpsgkglewlaniwwdddky |
| scFv | | ynpslknrltmskdtsnnqaflkitnvdtadtatyycariegspvvttvfdywgqgvmvtv |
| domain | | ssggggsggggsggggsggggsdiqmtqspsflsasvgdrvtinckasqninrylnwyq |
| | | qklgeapklliynanslqtgipsrfsgsgsgtdftltisslqpadvatyfclqhnsrpltfgsgtil |
| | | eik |
| CAR20-6 | 831 | caagtcactcttaaggaatccgggccaggactgttgcagccgagccagaccctgtccctcact |
| scFv | | tgtaccttcgccggcttttcactgaacacccacggaatgggcgtgggatggattaggcagccc |
| domain nt | | tcgggaaagggactggagtggctggccaacatttggtgggacgacgacaagtattacaaccc |
| | | gagcctcaagaaccgcctgactatgtccaaggatacctccaacaaccaggccttcctgaaaat |
| | | cactaacgtggataccgctgacaccgcaacgtactactgcgcccggatcgaaggttcccccg |
| | | tcgtgacaactgtgttcgactactggggacagggcgtgatggtgaccgtgtcctccggcggtg |
| | | gaggctcaggggggggcggctcgggagggggtggaagcggaggaggaggctccgacat |
| | | ccaaatgacccagtcacctagctttctgtcggcctcggtcggcgacagagtgaccattaactgc |
| | | aaagcgtcccagaacatcaaccgctacctgaattggtaccagcagaagctgggggaagccc |
| | | cgaagctgctgatctacaacgcgaacagcctccagactggtattccttcccggttctccggga |
| | | gcggctcgggtaccgatttcaccctcaccatctcctcccttcaacccgctgacgtggccaccta |
| | | cttctgcttgcaacataattctcggcctctgaccttcggaagcggcactatcctcgagatcaag |
| CAR20-6- | 832 | atggccctccctgtcaccgccctgctgcttccgctggctcttctgctccacgccgctcggcccc |
| Soluble | | aagtcactcttaaggaatccgggccaggactgttgcagccgagccagaccctgtccctcactt |
| scFv-nt | | gtaccttcgccggcttttcactgaacacccacggaatgggcgtgggatggattaggcagccct |
| | | cgggaaagggactggagtggctggccaacatttggtgggacgacgacaagtattacaaccc |
| | | gagcctcaagaaccgcctgactatgtccaaggatacctccaacaaccaggccttcctgaaaat |
| | | cactaacgtggataccgctgacaccgcaacgtactactgcgcccggatcgaaggttcccccg |
| | | tcgtgacaactgtgttcgactactggggacagggcgtgatggtgaccgtgtcctccggcggtg |
| | | gaggctcaggggggggcggctcgggagggggtggaagcggaggaggaggctccgacat |
| | | ccaaatgacccagtcacctagctttctgtcggcctcggtcggcgacagagtgaccattaactgc |
| | | aaagcgtcccagaacatcaaccgctacctgaattggtaccagcagaagctgggggaagccc |
| | | cgaagctgctgatctacaacgcgaacagcctccagactggtattccttcccggttctccggga |
| | | gcggctcgggtaccgatttcaccctcaccatctcctcccttcaacccgctgacgtggccaccta |
| | | cttctgcttgcaacataattctcggcctctgaccttcggaagcggcactatcctcgagatcaagg |
| | | gatcgcaccaccatcaccatcatcatcac |
| CAR20-6- | 833 | malpvtalllplalllhaarpqvtlkesgpgllqpsqtlsltctfagfslnthgmgvgwirqpsg |
| Soluble | | kglewlaniwwdddkyynpslknrltmskdtsnnqaflkitnvdtadtatyycariegspv |
| scFv-aa | | vttvfdywgqgvmvtvssggggsggggsggggsggggsdiqmtqspsflsasvgdrvti |
| | | nckasqninrylnwyqqklgeapklliynanslqtgipsrfsgsgsgtdftltisslqpadvat |
| | | yfclqhnsrpltfgsgtileikgshhhhhhhh |
| CAR20-6- | 834 | atggccctccctgtcaccgccctgctgcttccgctggctcttctgctccacgccgctcggcccc |
| Full-nt | | aagtcactcttaaggaatccgggccaggactgttgcagccgagccagaccctgtccctcactt |
| | | gtaccttcgccggcttttcactgaacacccacggaatgggcgtgggatggattaggcagccct |
| | | cgggaaagggactggagtggctggccaacatttggtgggacgacgacaagtattacaaccc |
| | | gagcctcaagaaccgcctgactatgtccaaggatacctccaacaaccaggccttcctgaaaat |
| | | cactaacgtggataccgctgacaccgcaacgtactactgcgcccggatcgaaggttcccccg |
| | | tcgtgacaactgtgttcgactactggggacagggcgtgatggtgaccgtgtcctccggcggtg |
| | | gaggctcaggggggggcggctcgggagggggtggaagcggaggaggaggctccgacat |
| | | ccaaatgacccagtcacctagctttctgtcggcctcggtcggcgacagagtgaccattaactgc |
| | | aaagcgtcccagaacatcaaccgctacctgaattggtaccagcagaagctgggggaagccc |
| | | cgaagctgctgatctacaacgcgaacagcctccagactggtattccttcccggttctccggga |
| | | gcggctcgggtaccgatttcaccctcaccatctcctcccttcaacccgctgacgtggccaccta |
| | | cttctgcttgcaacataattctcggcctctgaccttcggaagcggcactatcctcgagatcaaga |
| | | ccactaccccagcaccgaggccacccaccccggctcctaccatcgcctcccagcctctgtcc |
| | | ctgcgtccggaggcatgtagacccgcagctggtggggccgtgcatacccggggtcttgactt |
| | | cgcctgcgatatctacatttgggcccctctggctggtacttgcggggtcctgctgctttcactcgt |
| | | gatcactctttactgtaagcgcggtcggaagaagctgctgtacatctttaagcaacccttcatga |
| | | ggcctgtgcagactactcaagaggaggacggctgttcatgccggttcccagaggaggagga |
| | | aggcggctgcgaactgcgcgtgaaattcagccgcagcgcagatgctccagcctacaagcag |
| | | gggcagaaccagctctacaacgaactcaatcttggtcggagagaggagtacgacgtgctgg |
| | | acaagcggagaggacgggacccagaaatgggcgggaagccgcgcagaaagaatcccca |
| | | agagggcctgtacaacgagctccaaaaggataagatggcagaagcctatagcgagattggta |
| | | tgaaaggggaacgcagaagaggcaaaggccacgacggactgtaccagggactcagcacc |
| | | gccaccaaggacacctatgacgctcttcacatgcaggccctgccgcctcgg |
| CAR20-6- | 835 | malpvtalllplalllhaarpqvtlkesgpgllqpsqtlsltctfagfslnthgmgvgwirqpsg |
| Full-aa | | kglewlaniwwdddkyynpslknrltmskdtsnnqaflkitnvdtadtatyycariegspv |
| | | vttvfdywgqgvmvtvssggggsggggsggggsggggsdiqmtqspsflsasvgdrvti |
| | | nckasqninrylnwyqqklgeapklliynanslqtgipsrfsgsgsgtdftltisslqpadvat |
| | | yfclqhnsrpltfgsgtileiktttpaprpptpaptiasqplslrpeacrpaaggavhtrgldfac |
| | | diyiwaplagtcgvlllslvitlyckrgrkkllyifkqpfmrpvqttqeedgcscrfpeeeegg |
| | | celrvkfsrsadapaykqgqnqlynelnlgrreeydvldkrrgrdpemggkprrknpqeg |
| | | lynelqkdkmaeayseigmkgerrrgkghdglyqglstatkdtydalhmqalppr |
| CAR20-7 | 836 | qvtlkesgpgmlqpsktlsltcsfsgfslstsgmvvswirqpsgkslewlaaiawdgdkyy |
| scFv | | npslksrvtvskdtsntqvflritsvdiadtatyyctrrdydvgyyyfdfwgqgvmvtvssg |
| domain | | gggsggggsggggsggggskivltqsptitaaspgekvtitclassrvsniywyqqksgas |
| | | pklliystsslasgvpyrfsgsgsgtsysltintmeaedaatyychqwssnpwtfgggtklelk |
| CAR20-7 | 837 | caagtcaccctgaaagaatcgggtcccggaatgctgcagccatccaagacgctgtcccttaca |
| scFv | | tgctccttctccgggttcagcctctcaacttccgggatggtggtgtcatggatcagacagccga |
| domain nt | | gcggaaagtccctggagtggctggcggccatcgcatgggatggcgataagtactacaaccc |
| | | gagcctgaagtcaagggtcactgtgtccaaggacacctccaacacccaagtgttccttcggat |
| | | cacctccgtggacattgctgacaccgccacctattactgcactcgccgggactacgacgtggg |
| | | ctactactacttcgatttctggggacagggtgtcatggtgaccgtgtcctccggcggtggaggc |
| | | tcaggggggggcggctcgggagggggtggaagcggaggaggaggctccaagattgtgct |
| | | gacccagagccccactattaccgccgcctccccgggggaaaaggtcaccatcacttgtctgg |
| | | cgtcctcacgcgtgtcgaatatctactggtatcagcagaagtccggcgccagccccaagctgc |
| | | tgatctactcgacctcctccctcgcgtcgggagtgccttaccggttttctggctcgggaagcgg |
| | | aaccagctactccttgaccatcaacaccatggaagccgaggacgctgccacttactactgcca |
| | | ccagtggtcgagcaacccttggactttcggtggaggcaccaaactcgagctcaag |
| CAR20-7- | 838 | atggccctccctgtcaccgccctgctgcttccgctggctcttctgctccacgccgctcggcccc |
| Soluble | | aagtcaccctgaaagaatcgggtcccggaatgctgcagccatccaagacgctgtcccttacat |
| scFv-nt | | gctccttctccgggttcagcctctcaacttccgggatggtggtgtcatggatcagacagccgag |
| | | cggaaagtccctggagtggctggcggccatcgcatgggatggcgataagtactacaacccg |
| | | agcctgaagtcaagggtcactgtgtccaaggacacctccaacacccaagtgttccttcggatc |
| | | acctccgtggacattgctgacaccgccacctattactgcactcgccgggactacgacgtgggc |
| | | tactactacttcgatttctggggacagggtgtcatggtgaccgtgtcctccggcggtggaggct |
| | | caggggggggcggctcgggagggggtggaagcggaggaggaggctccaagattgtgctg |
| | | acccagagccccactattaccgccgcctccccgggggaaaaggtcaccatcacttgtctggc |
| | | gtcctcacgcgtgtcgaatatctactggtatcagcagaagtccggcgccagccccaagctgct |
| | | gatctactcgacctcctccctcgcgtcgggagtgccttaccggttttctggctcgggaagcgga |
| | | accagctactccttgaccatcaacaccatggaagccgaggacgctgccacttactactgccac |
| | | cagtggtcgagcaacccttggactttcggtggaggcaccaaactcgagctcaagggatcgca |
| | | ccaccatcaccatcatcatcac |
| CAR20-7- | 839 | malpvtalllplalllhaarpqvtlkesgpgmlqpsktlsltcsfsgfslstsgmvvswirqps |
| Soluble | | gkslewlaaiawdgdkyynpslksrvtvskdtsntqvflritsvdiadtatyyctrrdydvgy |
| scFv-aa | | yyfdfwgqgvmvtvssggggsggggsggggsggggskivltqsptitaaspgekvtitcl |
| | | assrvsniywyqqksgaspklliystsslasgvpyrfsgsgsgtsysltintmeaedaatyyc |
| | | hqwssnpwtfgggtklelkgshhhhhhhh |
| CAR20-7 | 840 | atggccctccctgtcaccgccctgctgcttccgctggctcttctgctccacgccgctcggcccc |
| Full-nt | | aagtcaccctgaaagaatcgggtcccggaatgctgcagccatccaagacgctgtcccttacat |
| | | gctccttctccgggttcagcctctcaacttccgggatggtggtgtcatggatcagacagccgag |
| | | cggaaagtccctggagtggctggcggccatcgcatgggatggcgataagtactacaacccg |
| | | agcctgaagtcaagggtcactgtgtccaaggacacctccaacacccaagtgttccttcggatc |
| | | acctccgtggacattgctgacaccgccacctattactgcactcgccgggactacgacgtgggc |
| | | tactactacttcgatttctggggacagggtgtcatggtgaccgtgtcctccggcggtggaggct |
| | | caggggggggcggctcgggagggggtggaagcggaggaggaggctccaagattgtgctg |
| | | acccagagccccactattaccgccgcctccccgggggaaaaggtcaccatcacttgtctggc |
| | | gtcctcacgcgtgtcgaatatctactggtatcagcagaagtccggcgccagccccaagctgct |
| | | gatctactcgacctcctccctcgcgtcgggagtgccttaccggttttctggctcgggaagcgga |
| | | accagctactccttgaccatcaacaccatggaagccgaggacgctgccacttactactgccac |
| | | cagtggtcgagcaacccttggactttcggtggaggcaccaaactcgagctcaagaccactac |
| | | cccagcaccgaggccacccaccccggctcctaccatcgcctcccagcctctgtccctgcgtc |
| | | cggaggcatgtagacccgcagctggtggggccgtgcatacccggggtcttgacttcgcctgc |
| | | gatatctacatttgggcccctctggctggtacttgcggggtcctgctgctttcactcgtgatcact |
| | | ctttactgtaagcgcggtcggaagaagctgctgtacatctttaagcaacccttcatgaggcctgt |
| | | gcagactactcaagaggaggacggctgttcatgccggttcccagaggaggaggaaggcgg |
| | | ctgcgaactgcgcgtgaaattcagccgcagcgcagatgctccagcctacaagcaggggcag |
| | | aaccagctctacaacgaactcaatcttggtcggagagaggagtacgacgtgctggacaagcg |
| | | gagaggacgggacccagaaatgggcgggaagccgcgcagaaagaatccccaagagggc |
| | | ctgtacaacgagctccaaaaggataagatggcagaagcctatagcgagattggtatgaaagg |
| | | ggaacgcagaagaggcaaaggccacgacggactgtaccagggactcagcaccgccacca |
| | | aggacacctatgacgctcttcacatgcaggccctgccgcctcgg |
| CAR20-7 | 841 | malpvtalllplalllhaarpqvtlkesgpgmlqpsktlsltcsfsgfslstsgmvvswirqps |
| Full-aa | | gkslewlaaiawdgdkyynpslksrvtvskdtsntqvflritsvdiadtatyyctrrdydvgy |
| | | yyfdfwgqgvmvtvssggggsggggsggggsggggskivltqsptitaaspgekvtitcl |
| | | assrvsniywyqqksgaspklliystsslasgvpyrfsgsgsgtsysltintmeaedaatyyc |
| | | hqwssnpwtfgggtklelktttpaprpptpaptiasqplslrpeacrpaaggavhtrgldfac |
| | | diyiwaplagtcgvlllslvitlyckrgrkkllyifkqpfmrpvqttqeedgcscrfpeeeegg |
| | | celrvkfsrsadapaykqgqnqlynelnlgrreeydvldkrrgrdpemggkprrknpqeg |
| | | lynelqkdkmaeayseigmkgerrrgkghdglyqglstatkdtydalhmqalppr |
| CAR20-8 | 842 | qiqlvqsgpelkkpgesvkisckasgntvtgyamhwvrqapgkglkwmgwintysgk |
| scFv | | ptyaddfkgrcvfsleasastahlqisnlknedtatyfcarstyygykdwfaywgqgtlvtv |
| domain | | ssggggsggggsggggsggggsniqltqspsrlsasvgdrvtlsckgsqninnylawyqq |
| | | klgeapklliyntnnlqtgipsrfsgsgsgtdytftisglqpedvatyfccqynngntfgagtkl |
| | | elk |
| CAR20-8 | 843 | caaattcagttggtgcagtccggcccggagctgaagaagcctggagaatccgtgaagatctc |
| scFv | | gtgcaaagcttccgggaacaccgtgaccggatacgcaatgcactgggtccgccaggcaccg |
| domain nt | | ggaaagggactgaagtggatggggtggatcaacacctacagcggaaagccgacttacgcc |
| | | gatgactttaagggacgctgtgtgttctccctggaagcgtccgcctcgactgcccatcttcaaat |
| | | ctccaacctgaagaatgaggacaccgccacttacttctgcgcccggagcacctattacggcta |
| | | caaggactggttcgcgtattggggccagggcactctcgtgaccgtgtcctccggcggtggag |
| | | gctcaggggggggcggctcgggagggggtggaagcggaggaggaggctccaacatcca |
| | | actgactcagagccccagccggctgtccgcctccgtgggggacagggtcacactgagctgc |
| | | aagggttctcagaacatcaacaactacctcgcgtggtaccagcagaagctgggagaggccc |
| | | ccaagctgctcatctacaacaccaacaatctgcaaactggcattccatcgagattctcaggatc |
| | | agggtccggtaccgactacaccttcacgatttcgggacttcagcctgaggatgtggccaccta |
| | | cttctgctgtcagtacaacaacggcaacaccttcggtgctggcaccaagctggaactcaaa |
| CAR20-8- | 844 | atggccctccctgtcaccgccctgctgcttccgctggctcttctgctccacgccgctcggcccc |
| Soluble | | aaattcagttggtgcagtccggcccggagctgaagaagcctggagaatccgtgaagatctcgt |
| scFv-nt | | gcaaagcttccgggaacaccgtgaccggatacgcaatgcactgggtccgccaggcaccgg |
| | | gaaagggactgaagtggatggggtggatcaacacctacagcggaaagccgacttacgccga |
| | | tgactttaagggacgctgtgtgttctccctggaagcgtccgcctcgactgcccatcttcaaatct |
| | | ccaacctgaagaatgaggacaccgccacttacttctgcgcccggagcacctattacggctaca |
| | | aggactggttcgcgtattggggccagggcactctcgtgaccgtgtcctccggcggtggaggc |
| | | tcaggggggggcggctcgggagggggtggaagcggaggaggaggctccaacatccaact |
| | | gactcagagccccagccggctgtccgcctccgtgggggacagggtcacactgagctgcaag |
| | | ggttctcagaacatcaacaactacctcgcgtggtaccagcagaagctgggagaggcccccaa |
| | | gctgctcatctacaacaccaacaatctgcaaactggcattccatcgagattctcaggatcaggg |
| | | tccggtaccgactacaccttcacgatttcgggacttcagcctgaggatgtggccacctacttctg |
| | | ctgtcagtacaacaacggcaacaccttcggtgctggcaccaagctggaactcaaaggatcgc |
| | | accaccatcaccatcatcatcac |
| CAR20-8- | 845 | malpvtalllplalllhaarpqiqlvqsgpelkkpgesvkisckasgntvtgyamhwvrqa |
| Soluble | | pgkglkwmgwintysgkptyaddfkgrcvfsleasastahlqisnlknedtatyfcarsty |
| scFv-aa | | ygykdwfaywgqgtlvtvssggggsggggsggggsggggsniqltqspsrlsasvgdrvt |
| | | lsckgsqninnylawyqqklgeapklliyntnnlqtgipsrfsgsgsgtdytftisglqpedv |
| | | atyfccqynngntfgagtklelkgshhhhhhhh |
| CAR20-8- | 846 | atggccctccctgtcaccgccctgctgcttccgctggctcttctgctccacgccgctcggcccc |
| Full-nt | | aaattcagttggtgcagtccggcccggagctgaagaagcctggagaatccgtgaagatctcgt |
| | | gcaaagcttccgggaacaccgtgaccggatacgcaatgcactgggtccgccaggcaccgg |
| | | gaaagggactgaagtggatggggtggatcaacacctacagcggaaagccgacttacgccga |
| | | tgactttaagggacgctgtgtgttctccctggaagcgtccgcctcgactgcccatcttcaaatct |
| | | ccaacctgaagaatgaggacaccgccacttacttctgcgcccggagcacctattacggctaca |
| | | aggactggttcgcgtattggggccagggcactctcgtgaccgtgtcctccggcggtggaggc |
| | | tcaggggggggcggctcgggagggggtggaagcggaggaggaggctccaacatccaact |
| | | gactcagagccccagccggctgtccgcctccgtgggggacagggtcacactgagctgcaag |
| | | ggttctcagaacatcaacaactacctcgcgtggtaccagcagaagctgggagaggcccccaa |
| | | gctgctcatctacaacaccaacaatctgcaaactggcattccatcgagattctcaggatcaggg |
| | | tccggtaccgactacaccttcacgatttcgggacttcagcctgaggatgtggccacctacttctg |
| | | ctgtcagtacaacaacggcaacaccttcggtgctggcaccaagctggaactcaaaaccacta |
| | | ccccagcaccgaggccacccaccccggctcctaccatcgcctcccagcctctgtccctgcgt |
| | | ccggaggcatgtagacccgcagctggtggggccgtgcatacccggggtcttgacttcgcctg |
| | | cgatatctacatttgggcccctctggctggtacttgcggggtcctgctgctttcactcgtgatcac |
| | | tctttactgtaagcgcggtcggaagaagctgctgtacatctttaagcaacccttcatgaggcctg |
| | | tgcagactactcaagaggaggacggctgttcatgccggttcccagaggaggaggaaggcgg |
| | | ctgcgaactgcgcgtgaaattcagccgcagcgcagatgctccagcctacaagcaggggcag |
| | | aaccagctctacaacgaactcaatcttggtcggagagaggagtacgacgtgctggacaagcg |
| | | gagaggacgggacccagaaatgggcgggaagccgcgcagaaagaatccccaagagggc |
| | | ctgtacaacgagctccaaaaggataagatggcagaagcctatagcgagattggtatgaaagg |
| | | ggaacgcagaagaggcaaaggccacgacggactgtaccagggactcagcaccgccacca |
| | | aggacacctatgacgctcttcacatgcaggccctgccgcctcgg |
| CAR20-8- | 847 | malpvtalllplalllhaarpqiqlvqsgpelkkpgesvkisckasgntvtgyamhwvrqa |
| Full-aa | | pgkglkwmgwintysgkptyaddfkgrcvfsleasastahlqisnlknedtatyfcarsty |
| | | ygykdwfaywgqgtlvtvssggggsggggsggggsggggsniqltqspsrlsasvgdrvt |
| | | lsckgsqninnylawyqqklgeapklliyntnnlqtgipsrfsgsgsgtdytftisglqpedv |
| | | atyfccqynngntfgagtklelktttpaprpptpaptiasqplslrpeacrpaaggavhtrgld |
| | | facdiyiwaplagtcgvlllslvitlyckrgrkkllyifkqpfmrpvqttqeedgcscrfpeee |
| | | eggcelrvkfsrsadapaykqgqnqlynelnlgrreeydvldkrrgrdpemggkprrknp |
| | | qeglynelqkdkmaeayseigmkgerrrgkghdglyqglstatkdtydalhmqalppr |
| CAR20-9 | 848 | divmtqtpssqavsagekvtmsckssqsllysenkknylawyqqkpgqspkllifwastr |
| scFv | | esgvpdrfigsgsgtdftltissvqaedlavyycqqyynfptfgsgtkleikggggsggggs |
| domain | | ggggsggggsevqlvesggglvqpgrslklscaasgftfrdyymawvrqapkkglewva |
| | | sisyegnpyygdsvkgrftisrnnakstlylqmnslrsedtatyycarhdhnnvdwfayw |
| | | gqgtlvtvss |
| CAR20-9 | 849 | gacatcgtgatgactcagactccaagcagccaggccgtgtccgccggagagaaagtcacca |
| scFv | | tgtcgtgcaagagctcccagtccctgctgtactccgaaaacaagaagaattatctcgcctggta |
| domain nt | | ccagcagaagcctggacagtccccgaagctcctgatcttttgggcgtcgaccagggaatccg |
| | | gcgtgcccgatcgcttcattggctccggttccggcaccgacttcaccctgaccattagcagcgt |
| | | ccaggcggaggacctggctgtgtactactgccaacagtactacaacttccccactttcggatcg |
| | | gggaccaagctggagatcaagggcggtggaggctcaggggggggcggctcgggagggg |
| | | gtggaagcggaggaggaggctccgaagtgcagcttgtggagtctggcggcggtctggtgca |
| | | gccgggaagatccctgaagctgtcatgcgccgcgtccgggtttaccttccgcgattactacatg |
| | | gcctgggtcagacaggcacctaagaaggggctggaatgggtggcatccatctcatatgaagg |
| | | aaacccgtactacggagactcggtgaaaggccgcttcactatctcacggaacaacgctaaga |
| | | gcacgctgtacttgcaaatgaactccctccggtcggaggacacagccacttactactgtgccc |
| | | ggcacgaccataacaacgtcgattggttcgcctactggggtcaaggaaccctcgtgaccgtgt |
| | | cctcc |
| CAR20-9- | 850 | atggccctccctgtcaccgccctgctgcttccgctggctcttctgctccacgccgctcggcccg |
| Soluble | | acatcgtgatgactcagactccaagcagccaggccgtgtccgccggagagaaagtcaccat |
| scFv-nt | | gtcgtgcaagagctcccagtccctgctgtactccgaaaacaagaagaattatctcgcctggtac |
| | | cagcagaagcctggacagtccccgaagctcctgatcttttgggcgtcgaccagggaatccgg |
| | | cgtgcccgatcgcttcattggctccggttccggcaccgacttcaccctgaccattagcagcgtc |
| | | caggcggaggacctggctgtgtactactgccaacagtactacaacttccccactttcggatcg |
| | | gggaccaagctggagatcaagggcggtggaggctcaggggggggcggctcgggagggg |
| | | gtggaagcggaggaggaggctccgaagtgcagcttgtggagtctggcggcggtctggtgca |
| | | gccgggaagatccctgaagctgtcatgcgccgcgtccgggtttaccttccgcgattactacatg |
| | | gcctgggtcagacaggcacctaagaaggggctggaatgggtggcatccatctcatatgaagg |
| | | aaacccgtactacggagactcggtgaaaggccgcttcactatctcacggaacaacgctaaga |
| | | gcacgctgtacttgcaaatgaactccctccggtcggaggacacagccacttactactgtgccc |
| | | ggcacgaccataacaacgtcgattggttcgcctactggggtcaaggaaccctcgtgaccgtgt |
| | | cctccggatcgcaccaccatcaccatcatcatcac |
| CAR20-9- | 851 | malpvtalllplalllhaarpdivmtqtpssqavsagekvtmsckssqsllysenkknylaw |
| Soluble | | yqqkpgqspkllifwastresgvpdrfigsgsgtdftltissvqaedlavyycqqyynfptfg |
| scFv-aa | | sgtkleikggggsggggsggggsggggsevqlvesggglvqpgrslklscaasgftfrdyy |
| | | mawvrqapkkglewvasisyegnpyygdsvkgrftisrnnakstlylqmnslrsedtaty |
| | | ycarhdhnnvdwfaywgqgtlvtvssgshhhhhhhh |
| CAR20-9- | 852 | atggccctccctgtcaccgccctgctgcttccgctggctcttctgctccacgccgctcggcccg |
| Full-nt | | acatcgtgatgactcagactccaagcagccaggccgtgtccgccggagagaaagtcaccat |
| | | gtcgtgcaagagctcccagtccctgctgtactccgaaaacaagaagaattatctcgcctggtac |
| | | cagcagaagcctggacagtccccgaagctcctgatcttttgggcgtcgaccagggaatccgg |
| | | cgtgcccgatcgcttcattggctccggttccggcaccgacttcaccctgaccattagcagcgtc |
| | | caggcggaggacctggctgtgtactactgccaacagtactacaacttccccactttcggatcg |
| | | gggaccaagctggagatcaagggcggtggaggctcaggggggggcggctcgggagggg |
| | | gtggaagcggaggaggaggctccgaagtgcagcttgtggagtctggcggcggtctggtgca |
| | | gccgggaagatccctgaagctgtcatgcgccgcgtccgggtttaccttccgcgattactacatg |
| | | gcctgggtcagacaggcacctaagaaggggctggaatgggtggcatccatctcatatgaagg |
| | | aaacccgtactacggagactcggtgaaaggccgcttcactatctcacggaacaacgctaaga |
| | | gcacgctgtacttgcaaatgaactccctccggtcggaggacacagccacttactactgtgccc |
| | | ggcacgaccataacaacgtcgattggttcgcctactggggtcaaggaaccctcgtgaccgtgt |
| | | cctccaccactaccccagcaccgaggccacccaccccggctcctaccatcgcctcccagcct |
| | | ctgtccctgcgtccggaggcatgtagacccgcagctggtggggccgtgcatacccggggtct |
| | | tgacttcgcctgcgatatctacatttgggcccctctggctggtacttgcggggtcctgctgctttc |
| | | actcgtgatcactctttactgtaagcgcggtcggaagaagctgctgtacatctttaagcaaccctt |
| | | catgaggcctgtgcagactactcaagaggaggacggctgttcatgccggttcccagaggagg |
| | | aggaaggcggctgcgaactgcgcgtgaaattcagccgcagcgcagatgctccagcctacaa |
| | | gcaggggcagaaccagctctacaacgaactcaatcttggtcggagagaggagtacgacgtg |
| | | ctggacaagcggagaggacgggacccagaaatgggcgggaagccgcgcagaaagaatc |
| | | cccaagagggcctgtacaacgagctccaaaaggataagatggcagaagcctatagcgagat |
| | | tggtatgaaaggggaacgcagaagaggcaaaggccacgacggactgtaccagggactcag |
| | | caccgccaccaaggacacctatgacgctcttcacatgcaggccctgccgcctcgg |
| CAR20-9- | 853 | malpvtalllplalllhaarpdivmtqtpssqavsagekvtmsckssqsllysenkknylaw |
| Full-aa | | yqqkpgqspkllifwastresgvpdrfigsgsgtdftltissvqaedlavyycqqyynfptfg |
| | | sgtkleikggggsggggsggggsggggsevqlvesggglvqpgrslklscaasgftfrdyy |
| | | mawvrqapkkglewvasisyegnpyygdsvkgrftisrnnakstlylqmnslrsedtaty |
| | | ycarhdhnnvdwfaywgqgtlvtvsstttpaprpptpaptiasqplslrpeacrpaaggav |
| | | htrgldfacdiyiwaplagtcgvlllslvitlyckrgrkkllyifkqpfmrpvqttqeedgcscr |
| | | fpeeeeggcelrvkfsrsadapaykqgqnqlynelnlgrreeydvldkrrgrdpemggkp |
| | | rrknpqeglynelqkdkmaeayseigmkgerrrgkghdglyqglstatkdtydalhmqa |
| | | lppr |
| CAR20-10 | 854 | diqmtqsppslsaslgdkvtitcqasqninkyiawyqqkpgkaprllirytstlesgtpsrfsg |
| scFv | | sgsgrdysfsisnvesgdvasyyclqyddlpytfgpgtklelkggggsggggsggggsgg |
| domain | | ggsevqlvesggglvqpgtslklscvasgftfsssgmqwirqapkkglewisgiyydsyk |
| | | ksyadsvkgrftisrdnskntlylemnslrsedtatyycaksayygykdyfdywgqgvm |
| | | vtvss |
| CAR20-10 | 855 | gacatccaaatgacacagtcacccccttctctttccgcgagcctgggagataaggtcaccatta |
| scFv | | cgtgccaagcgtcccagaacatcaacaagtacatcgcctggtaccagcagaaaccgggaaa |
| domain nt | | ggccccgcggctgctgattagatacacctcgactctggaatccggcactccatcaagattcag |
| | | cggctccggcagcgggagggactactcgttctccatctccaatgtggagtccggggacgtgg |
| | | ccagctactattgcctgcaatacgacgatctgccctacaccttcggacctggaaccaagctgg |
| | | aactcaagggcggtggaggctcaggggggggcggctcgggagggggtggaagcggagg |
| | | aggaggctccgaggtccagcttgtggaatcaggaggcggactcgtccagccgggtactagc |
| | | ctgaagctcagctgtgtggccagcggttttaccttctcgtcctccgggatgcagtggattcggc |
| | | aggctcccaagaagggactggaatggatctcgggcatctactacgactcgtacaagaagtcct |
| | | acgccgattccgtgaaaggtcgcttcaccatctcccgggacaacagcaagaacactctgtacc |
| | | tcgagatgaactccttgcgctccgaggataccgcaacctattactgcgccaagtcggcctacta |
| | | cggctacaaggactacttcgactattggggccagggagtgatggtgaccgtgtcctcc |
| CAR20-10- | 856 | atggccctccctgtcaccgccctgctgcttccgctggctcttctgctccacgccgctcggcccg |
| Soluble | | acatccaaatgacacagtcacccccttctctttccgcgagcctgggagataaggtcaccattac |
| scFv-nt | | gtgccaagcgtcccagaacatcaacaagtacatcgcctggtaccagcagaaaccgggaaag |
| | | gccccgcggctgctgattagatacacctcgactctggaatccggcactccatcaagattcagc |
| | | ggctccggcagcgggagggactactcgttctccatctccaatgtggagtccggggacgtggc |
| | | cagctactattgcctgcaatacgacgatctgccctacaccttcggacctggaaccaagctgga |
| | | actcaagggcggtggaggctcaggggggggcggctcgggagggggtggaagcggagga |
| | | ggaggctccgaggtccagcttgtggaatcaggaggcggactcgtccagccgggtactagcc |
| | | tgaagctcagctgtgtggccagcggttttaccttctcgtcctccgggatgcagtggattcggca |
| | | ggctcccaagaagggactggaatggatctcgggcatctactacgactcgtacaagaagtccta |
| | | cgccgattccgtgaaaggtcgcttcaccatctcccgggacaacagcaagaacactctgtacct |
| | | cgagatgaactccttgcgctccgaggataccgcaacctattactgcgccaagtcggcctacta |
| | | cggctacaaggactacttcgactattggggccagggagtgatggtgaccgtgtcctccggatc |
| | | gcaccaccatcaccatcatcatcac |
| CAR20-10- | 857 | malpvtalllplalllhaarpdiqmtqsppslsaslgdkvtitcqasqninkyiawyqqkpg |
| Soluble | | kaprllirytstlesgtpsrfsgsgsgrdysfsisnvesgdvasyyclqyddlpytfgpgtklel |
| scFv-aa | | kggggsggggsggggsggggsevqlvesggglvqpgtslklscvasgftfsssgmqwir |
| | | qapkkglewisgiyydsykksyadsvkgrftisrdnskntlylemnslrsedtatyycaksa |
| | | yygykdyfdywgqgvmvtvssgshhhhhhhh |
| 194181 | 858 | atggccctccctgtcaccgccctgctgcttccgctggctcttctgctccacgccgctcggcccg |
| CAR20-10- | | acatccaaatgacacagtcacccccttctctttccgcgagcctgggagataaggtcaccattac |
| Full-nt | | gtgccaagcgtcccagaacatcaacaagtacatcgcctggtaccagcagaaaccgggaaag |
| | | gccccgcggctgctgattagatacacctcgactctggaatccggcactccatcaagattcagc |
| | | ggctccggcagcgggagggactactcgttctccatctccaatgtggagtccggggacgtggc |
| | | cagctactattgcctgcaatacgacgatctgccctacaccttcggacctggaaccaagctgga |
| | | actcaagggcggtggaggctcaggggggggcggctcgggagggggtggaagcggagga |
| | | ggaggctccgaggtccagcttgtggaatcaggaggcggactcgtccagccgggtactagcc |
| | | tgaagctcagctgtgtggccagcggttttaccttctcgtcctccgggatgcagtggattcggca |
| | | ggctcccaagaagggactggaatggatctcgggcatctactacgactcgtacaagaagtccta |
| | | cgccgattccgtgaaaggtcgcttcaccatctcccgggacaacagcaagaacactctgtacct |
| | | cgagatgaactccttgcgctccgaggataccgcaacctattactgcgccaagtcggcctacta |
| | | cggctacaaggactacttcgactattggggccagggagtgatggtgaccgtgtcctccaccac |
| | | taccccagcaccgaggccacccaccccggctcctaccatcgcctcccagcctctgtccctgc |
| | | gtccggaggcatgtagacccgcagctggtggggccgtgcatacccggggtcttgacttcgcc |
| | | tgcgatatctacatttgggcccctctggctggtacttgcggggtcctgctgctttcactcgtgatc |
| | | actctttactgtaagcgcggtcggaagaagctgctgtacatctttaagcaacccttcatgaggcc |
| | | tgtgcagactactcaagaggaggacggctgttcatgccggttcccagaggaggaggaaggc |
| | | ggctgcgaactgcgcgtgaaattcagccgcagcgcagatgctccagcctacaagcaggggc |
| | | agaaccagctctacaacgaactcaatcttggtcggagagaggagtacgacgtgctggacaag |
| | | cggagaggacgggacccagaaatgggcgggaagccgcgcagaaagaatccccaagagg |
| | | gcctgtacaacgagctccaaaaggataagatggcagaagcctatagcgagattggtatgaaa |
| | | ggggaacgcagaagaggcaaaggccacgacggactgtaccagggactcagcaccgccac |
| | | caaggacacctatgacgctcttcacatgcaggccctgccgcctcgg |
| 194181 | 859 | malpvtalllplalllhaarpdiqmtqsppslsaslgdkvtitcqasqninkyiawyqqkpg |
| CAR20-10- | | kaprllirytstlesgtpsrfsgsgsgrdysfsisnvesgdvasyyclqyddlpytfgpgtklel |
| Full-aa | | kggggsggggsggggsggggsevqlvesggglvqpgtslklscvasgftfsssgmqwir |
| | | qapkkglewisgiyydsykksyadsvkgrftisrdnskntlylemnslrsedtatyycaksa |
| | | yygykdyfdywgqgvmvtvsstttpaprpptpaptiasqplslrpeacrpaaggavhtrgl |
| | | dfacdiyiwaplagtcgvlllslvitlyckrgrkkllyifkqpfmrpvqttqeedgcscrfpee |
| | | eeggcelrvkfsrsadapaykqgqnqlynelnlgrreeydvldkrrgrdpemggkprrkn |
| | | pqeglynelqkdkmaeayseigmkgerrrgkghdglyqglstatkdtydalhmqalppr |
| CAR20-11 | 860 | divmtqtpssqavsagekvtmsckssqsllysenkknylawyqqkpgqspklliywastr |
| scFv | | esgvpdrfigsgsgtdftltissvqaedlavyycqqyynfppwtfgggtklelkggggsggg |
| domain | | gsggggsggggsqiqlvqsgpelkkpgesvkiscktseytftdyafhwvkqapgkglkw |
| | | mgwintysgkptyaddfkgrfvfsledsartanlqisnlknedtatyfcargayygyrdwft |
| | | ywgqgtlvtvss |
| CAR20-11 | 861 | gatattgtgatgacccagaccccgtcgagccaggcagtgtccgctggagaaaaggtcaccat |
| scFv | | gtcctgcaagagctcacagtccctgttgtactccgaaaacaagaagaattacctggcctggtac |
| domain nt | | cagcagaagcccggacagtcccctaaactgctgatctactgggcctcgactagggaatctgg |
| | | cgtgcccgaccgctttatcggaagcggttcagggactgacttcaccctgaccattagcagcgt |
| | | gcaggccgaggacctggcggtgtactactgtcaacagtactacaacttcccgccctggacttt |
| | | cggcggtggaacgaagctcgaactcaagggcggtggaggctcaggggggggcggctcgg |
| | | gagggggtggaagcggaggaggaggctcccaaattcaactggtccagtccggccctgagct |
| | | gaagaagccgggagaatccgtgaagatctcctgcaagacctcggagtacaccttcactgact |
| | | acgccttccactgggtcaagcaggcacctgggaaaggcctgaagtggatgggctggatcaa |
| | | cacttactcggggaagccaacctacgccgatgatttcaagggaagattcgtgtttagcctggag |
| | | gactccgcccggacagctaacctccaaatctccaaccttaagaacgaggacactgcgaccta |
| | | cttctgcgcgcggggagcctattacggttatcgcgactggttcacctactggggacagggcac |
| | | cctcgtgaccgtgtcctcc |
| CAR20-11- | 862 | atggccctccctgtcaccgccctgctgcttccgctggctcttctgctccacgccgctcggcccg |
| Soluble | | atattgtgatgacccagaccccgtcgagccaggcagtgtccgctggagaaaaggtcaccatg |
| scFv-nt | | tcctgcaagagctcacagtccctgttgtactccgaaaacaagaagaattacctggcctggtacc |
| | | agcagaagcccggacagtcccctaaactgctgatctactgggcctcgactagggaatctggc |
| | | gtgcccgaccgctttatcggaagcggttcagggactgacttcaccctgaccattagcagcgtg |
| | | caggccgaggacctggcggtgtactactgtcaacagtactacaacttcccgccctggactttc |
| | | ggcggtggaacgaagctcgaactcaagggcggtggaggctcaggggggggcggctcggg |
| | | agggggtggaagcggaggaggaggctcccaaattcaactggtccagtccggccctgagctg |
| | | aagaagccgggagaatccgtgaagatctcctgcaagacctcggagtacaccttcactgacta |
| | | cgccttccactgggtcaagcaggcacctgggaaaggcctgaagtggatgggctggatcaac |
| | | acttactcggggaagccaacctacgccgatgatttcaagggaagattcgtgtttagcctggag |
| | | gactccgcccggacagctaacctccaaatctccaaccttaagaacgaggacactgcgaccta |
| | | cttctgcgcgcggggagcctattacggttatcgcgactggttcacctactggggacagggcac |
| | | cctcgtgaccgtgtcctccggatcgcaccaccatcaccatcatcatcac |
| CAR20-11- | 863 | malpvtalllplalllhaarpdivmtqtpssqavsagekvtmsckssqsllysenkknylaw |
| Soluble | | yqqkpgqspklliywastresgvpdrfigsgsgtdftltissvqaedlavyycqqyynfpp |
| scFv-aa | | wtfgggtklelkggggsggggsggggsggggsqiqlvqsgpelkkpgesvkiscktseyt |
| | | ftdyafhwvkqapgkglkwmgwintysgkptyaddfkgrfvfsledsartanlqisnlkn |
| | | edtatyfcargayygyrdwftywgqgtlvtvssgshhhhhhhh |
| CAR20-11- | 864 | atggccctccctgtcaccgccctgctgcttccgctggctcttctgctccacgccgctcggcccg |
| Full-nt | | atattgtgatgacccagaccccgtcgagccaggcagtgtccgctggagaaaaggtcaccatg |
| | | tcctgcaagagctcacagtccctgttgtactccgaaaacaagaagaattacctggcctggtacc |
| | | agcagaagcccggacagtcccctaaactgctgatctactgggcctcgactagggaatctggc |
| | | gtgcccgaccgctttatcggaagcggttcagggactgacttcaccctgaccattagcagcgtg |
| | | caggccgaggacctggcggtgtactactgtcaacagtactacaacttcccgccctggactttc |
| | | ggcggtggaacgaagctcgaactcaagggcggtggaggctcaggggggggcggctcggg |
| | | agggggtggaagcggaggaggaggctcccaaattcaactggtccagtccggccctgagctg |
| | | aagaagccgggagaatccgtgaagatctcctgcaagacctcggagtacaccttcactgacta |
| | | cgccttccactgggtcaagcaggcacctgggaaaggcctgaagtggatgggctggatcaac |
| | | acttactcggggaagccaacctacgccgatgatttcaagggaagattcgtgtttagcctggag |
| | | gactccgcccggacagctaacctccaaatctccaaccttaagaacgaggacactgcgaccta |
| | | cttctgcgcgcggggagcctattacggttatcgcgactggttcacctactggggacagggcac |
| | | cctcgtgaccgtgtcctccaccactaccccagcaccgaggccacccaccccggctcctacca |
| | | tcgcctcccagcctctgtccctgcgtccggaggcatgtagacccgcagctggtggggccgtg |
| | | catacccggggtcttgacttcgcctgcgatatctacatttgggcccctctggctggtacttgcgg |
| | | ggtcctgctgctttcactcgtgatcactctttactgtaagcgcggtcggaagaagctgctgtacat |
| | | ctttaagcaacccttcatgaggcctgtgcagactactcaagaggaggacggctgttcatgccg |
| | | gttcccagaggaggaggaaggcggctgcgaactgcgcgtgaaattcagccgcagcgcaga |
| | | tgctccagcctacaagcaggggcagaaccagctctacaacgaactcaatcttggtcggagag |
| | | aggagtacgacgtgctggacaagcggagaggacgggacccagaaatgggcgggaagcc |
| | | gcgcagaaagaatccccaagagggcctgtacaacgagctccaaaaggataagatggcaga |
| | | agcctatagcgagattggtatgaaaggggaacgcagaagaggcaaaggccacgacggact |
| | | gtaccagggactcagcaccgccaccaaggacacctatgacgctcttcacatgcaggccctgc |
| | | cgcctcgg |
| CAR20-11- | 865 | malpvtalllplalllhaarpdivmtqtpssqavsagekvtmsckssqsllysenkknylaw |
| Full-aa | | yqqkpgqspklliywastresgvpdrfigsgsgtdftltissvqaedlavyycqqyynfpp |
| | | wtfgggtklelkggggsggggsggggsggggsqiqlvqsgpelkkpgesvkiscktseyt |
| | | ftdyafhwvkqapgkglkwmgwintysgkptyaddfkgrfvfsledsartanlqisnlkn |
| | | edtatyfcargayygyrdwftywgqgtlvtvsstttpaprpptpaptiasqplslrpeacrpa |
| | | aggavhtrgldfacdiyiwaplagtcgvlllslvitlyckrgrkkllyifkqpfmrpvqttqee |
| | | dgcscrfpeeeeggcelrvkfsrsadapaykqgqnqlynelnlgrreeydvldkrrgrdpe |
| | | mggkprrknpqeglynelqkdkmaeayseigmkgerrrgkghdglyqglstatkdtyd |
| | | alhmqalppr |
| CAR20-12 | 866 | qvvltqpksvstslestvklsckinsgnigsyfihwyqqhegrspttmiyrddkrphgvpdr |
| scFv | | fsgsidsssnsafltinnvqtedeaiyfchsydsginivfgggtkltvlggggsggggsgggg |
| domain | | sggggsevqlvesggglvqpgrslklsclasgftfskygmnwirqapgkglewvasissts |
| | | iyiyyadtvkgrftisrenakntlylqmtslrsedtalyycarhdyssysywgqgvmvtvss |
| CAR20-12 | 867 | caagtcgtgctgacgcaacccaagtccgtgagcaccagcctggagagcaccgtgaagctca |
| scFv | | gctgcaagattaactcgggcaacattgggtcctacttcatccattggtaccagcagcacgaag |
| domain nt | | gacggtcccctaccactatgatctaccgggacgacaagcggccgcacggagtgccggaca |
| | | gattctcgggttcaatcgattcctcatctaactcggcgtttctcaccatcaacaacgtgcagacc |
| | | gaggacgaagcgatctacttctgccactcctacgactcgggtattaacattgtgttcggcggcg |
| | | ggactaagctgacagtgctgggcggtggaggctcaggggggggcggctcgggagggggt |
| | | ggaagcggaggaggaggctccgaggtgcagctcgtcgaatccggtggaggactggtgcag |
| | | ccaggaagatccctgaagctgtcctgtctcgcctcgggcttcactttctccaaatacggcatga |
| | | attggattcgccaggcacccggaaaggggctggaatgggtggccagcatcagctcgactag |
| | | catctacatctactatgccgataccgtcaagggccgcttcactatctcccgcgagaacgctaag |
| | | aacaccctttacttgcaaatgacctccctgaggtccgaagataccgccctgtactattgcgccc |
| | | ggcacgactactcatcctactcctactggggacagggagtcatggtgaccgtgtcctcc |
| CAR20-12- | 868 | atggccctccctgtcaccgccctgctgcttccgctggctcttctgctccacgccgctcggcccc |
| Soluble | | aagtcgtgctgacgcaacccaagtccgtgagcaccagcctggagagcaccgtgaagctcag |
| scFv-nt | | ctgcaagattaactcgggcaacattgggtcctacttcatccattggtaccagcagcacgaagga |
| | | cggtcccctaccactatgatctaccgggacgacaagcggccgcacggagtgccggacagat |
| | | tctcgggttcaatcgattcctcatctaactcggcgtttctcaccatcaacaacgtgcagaccgag |
| | | gacgaagcgatctacttctgccactcctacgactcgggtattaacattgtgttcggcggcggga |
| | | ctaagctgacagtgctgggcggtggaggctcaggggggggcggctcgggagggggtgga |
| | | agcggaggaggaggctccgaggtgcagctcgtcgaatccggtggaggactggtgcagcca |
| | | ggaagatccctgaagctgtcctgtctcgcctcgggcttcactttctccaaatacggcatgaattg |
| | | gattcgccaggcacccggaaaggggctggaatgggtggccagcatcagctcgactagcatc |
| | | tacatctactatgccgataccgtcaagggccgcttcactatctcccgcgagaacgctaagaaca |
| | | ccctttacttgcaaatgacctccctgaggtccgaagataccgccctgtactattgcgcccggca |
| | | cgactactcatcctactcctactggggacagggagtcatggtgaccgtgtcctccggatcgca |
| | | ccaccatcaccatcatcatcac |
| CAR20-12- | 869 | malpvtalllplalllhaarpqvvltqpksvstslestvklsckinsgnigsyfihwyqqhegr |
| Soluble | | spttmiyrddkrphgvpdrfsgsidsssnsafltinnvqtedeaiyfchsydsginivfgggt |
| scFv-aa | | kltvlggggsggggsggggsggggsevqlvesggglvqpgrslklsclasgftfskygmn |
| | | wirqapgkglewvasisstsiyiyyadtvkgrftisrenakntlylqmtslrsedtalyycarh |
| | | dyssysywgqgvmvtvssgshhhhhhhh |
| CAR20-12- | 870 | atggccctccctgtcaccgccctgctgcttccgctggctcttctgctccacgccgctcggcccc |
| Full-nt | | aagtcgtgctgacgcaacccaagtccgtgagcaccagcctggagagcaccgtgaagctcag |
| | | ctgcaagattaactcgggcaacattgggtcctacttcatccattggtaccagcagcacgaagga |
| | | cggtcccctaccactatgatctaccgggacgacaagcggccgcacggagtgccggacagat |
| | | tctcgggttcaatcgattcctcatctaactcggcgtttctcaccatcaacaacgtgcagaccgag |
| | | gacgaagcgatctacttctgccactcctacgactcgggtattaacattgtgttcggcggcggga |
| | | ctaagctgacagtgctgggcggtggaggctcaggggggggcggctcgggagggggtgga |
| | | agcggaggaggaggctccgaggtgcagctcgtcgaatccggtggaggactggtgcagcca |
| | | ggaagatccctgaagctgtcctgtctcgcctcgggcttcactttctccaaatacggcatgaattg |
| | | gattcgccaggcacccggaaaggggctggaatgggtggccagcatcagctcgactagcatc |
| | | tacatctactatgccgataccgtcaagggccgcttcactatctcccgcgagaacgctaagaaca |
| | | ccctttacttgcaaatgacctccctgaggtccgaagataccgccctgtactattgcgcccggca |
| | | cgactactcatcctactcctactggggacagggagtcatggtgaccgtgtcctccaccactacc |
| | | ccagcaccgaggccacccaccccggctcctaccatcgcctcccagcctctgtccctgcgtcc |
| | | ggaggcatgtagacccgcagctggtggggccgtgcatacccggggtcttgacttcgcctgcg |
| | | atatctacatttgggcccctctggctggtacttgcggggtcctgctgctttcactcgtgatcactct |
| | | ttactgtaagcgcggtcggaagaagctgctgtacatctttaagcaacccttcatgaggcctgtg |
| | | cagactactcaagaggaggacggctgttcatgccggttcccagaggaggaggaaggcggct |
| | | gcgaactgcgcgtgaaattcagccgcagcgcagatgctccagcctacaagcaggggcaga |
| | | accagctctacaacgaactcaatcttggtcggagagaggagtacgacgtgctggacaagcgg |
| | | agaggacgggacccagaaatgggcgggaagccgcgcagaaagaatccccaagagggcct |
| | | gtacaacgagctccaaaaggataagatggcagaagcctatagcgagattggtatgaaaggg |
| | | gaacgcagaagaggcaaaggccacgacggactgtaccagggactcagcaccgccaccaa |
| | | ggacacctatgacgctcttcacatgcaggccctgccgcctcgg |
| CAR20-12- | 871 | malpvtalllplalllhaarpqvvltqpksvstslestvklsckinsgnigsyfihwyqqhegr |
| Full-aa | | spttmiyrddkrphgvpdrfsgsidsssnsafltinnvqtedeaiyfchsydsginivfgggt |
| | | kltvlggggsggggsggggsggggsevqlvesggglvqpgrslklsclasgftfskygmn |
| | | wirqapgkglewvasisstsiyiyyadtvkgrftisrenakntlylqmtslrsedtalyycarh |
| | | dyssysywgqgvmvtvsstttpaprpptpaptiasqplslrpeacrpaaggavhtrgldfac |
| | | diyiwaplagtcgvlllslvitlyckrgrkkllyifkqpfmrpvqttqeedgcscrfpeeeegg |
| | | celrvkfsrsadapaykqgqnqlynelnlgrreeydvldkrrgrdpemggkprrknpqeg |
| | | lynelqkdkmaeayseigmkgerrrgkghdglyqglstatkdtydalhmqalppr |
| CAR20-13 | 872 | dvqmtqspsllsasvgdavtinckasqninrylnwyqqklgegprlliysanslqtgipsrfs |
| scFv | | gsgsgadftltitspqpedvatyfclqhnswpltfgsgtkleikggggsggggsggggsggg |
| domain | | gsqvtlkesgpgilqpsqtlsltctftrfslstygmsvgwirqpsgkglewladiwwdddkh |
| | | ynpslknrltiskdtsknqaflkitnvdtadtatyycarssttdgivtyvmdvwgqgasvtvss |
| CAR20-13 | 873 | gacgtgcagatgactcagtccccgtcgctcctgtccgcctccgtcggcgacgccgtgactatt |
| scFv | | aactgcaaggcgtcccagaacatcaatcggtacctgaactggtaccagcaaaaactgggaga |
| domain nt | | agggccgagacttctcatctactccgccaactccctgcaaactggcatcccgtcgaggttcag |
| | | cggatcaggctctggtgccgacttcactttgaccatcacgagccctcagcccgaagatgtggc |
| | | cacctacttctgcctccaacacaactcctggcccctgacctttggttcgggcaccaagctggag |
| | | atcaagggcggtggaggctcaggggggggcggctcgggagggggtggaagcggaggag |
| | | gaggctcccaagtcacgctgaaggaatcgggccctggaattctgcagccaagccagaccct |
| | | ctcgcttacttgcaccttcacccgcttctcactgtccacttacggaatgtccgtgggatggattcg |
| | | gcagcccagcggaaagggtttggagtggctggccgacatttggtgggatgacgacaagcatt |
| | | acaaccctagcctgaagaatcggctcaccatcagcaaagacacctccaagaaccaggcgttc |
| | | ctgaagatcaccaacgtggataccgccgacactgcaacatactattgtgcccgctcctcaacc |
| | | accgatgggatcgtgacctacgtgatggacgtctggggccagggagcttccgtgaccgtgtc |
| | | ctcc |
| CAR20-13- | 874 | atggccctccctgtcaccgccctgctgcttccgctggctcttctgctccacgccgctcggcccg |
| Soluble | | acgtgcagatgactcagtccccgtcgctcctgtccgcctccgtcggcgacgccgtgactatta |
| scFv-nt | | actgcaaggcgtcccagaacatcaatcggtacctgaactggtaccagcaaaaactgggagaa |
| | | gggccgagacttctcatctactccgccaactccctgcaaactggcatcccgtcgaggttcagc |
| | | ggatcaggctctggtgccgacttcactttgaccatcacgagccctcagcccgaagatgtggcc |
| | | acctacttctgcctccaacacaactcctggcccctgacctttggttcgggcaccaagctggaga |
| | | tcaagggcggtggaggctcaggggggggcggctcgggagggggtggaagcggaggagg |
| | | aggctcccaagtcacgctgaaggaatcgggccctggaattctgcagccaagccagaccctct |
| | | cgcttacttgcaccttcacccgcttctcactgtccacttacggaatgtccgtgggatggattcgg |
| | | cagcccagcggaaagggtttggagtggctggccgacatttggtgggatgacgacaagcatta |
| | | caaccctagcctgaagaatcggctcaccatcagcaaagacacctccaagaaccaggcgttcc |
| | | tgaagatcaccaacgtggataccgccgacactgcaacatactattgtgcccgctcctcaacca |
| | | ccgatgggatcgtgacctacgtgatggacgtctggggccagggagcttccgtgaccgtgtcct |
| | | ccggatcgcaccaccatcaccatcatcatcac |
| CAR20-13- | 875 | malpvtalllplalllhaarpdvqmtqspsllsasvgdavtinckasqninrylnwyqqklg |
| Soluble | | egprlliysanslqtgipsrfsgsgsgadftltitspqpedvatyfclqhnswpltfgsgtkleik |
| scFv-aa | | ggggsggggsggggsggggsqvtlkesgpgilqpsqtlsltctftrfslstygmsvgwirqp |
| | | sgkglewladiwwdddkhynpslknrltiskdtsknqaflkitnvdtadtatyycarssttd |
| | | givtyvmdvwgqgasvtvssgshhhhhhhh |
| CAR20-13- | 876 | atggccctccctgtcaccgccctgctgcttccgctggctcttctgctccacgccgctcggcccg |
| Full nt | | acgtgcagatgactcagtccccgtcgctcctgtccgcctccgtcggcgacgccgtgactatta |
| | | actgcaaggcgtcccagaacatcaatcggtacctgaactggtaccagcaaaaactgggagaa |
| | | gggccgagacttctcatctactccgccaactccctgcaaactggcatcccgtcgaggttcagc |
| | | ggatcaggctctggtgccgacttcactttgaccatcacgagccctcagcccgaagatgtggcc |
| | | acctacttctgcctccaacacaactcctggcccctgacctttggttcgggcaccaagctggaga |
| | | tcaagggcggtggaggctcaggggggggcggctcgggagggggtggaagcggaggagg |
| | | aggctcccaagtcacgctgaaggaatcgggccctggaattctgcagccaagccagaccctct |
| | | cgcttacttgcaccttcacccgcttctcactgtccacttacggaatgtccgtgggatggattcgg |
| | | cagcccagcggaaagggtttggagtggctggccgacatttggtgggatgacgacaagcatta |
| | | caaccctagcctgaagaatcggctcaccatcagcaaagacacctccaagaaccaggcgttcc |
| | | tgaagatcaccaacgtggataccgccgacactgcaacatactattgtgcccgctcctcaacca |
| | | ccgatgggatcgtgacctacgtgatggacgtctggggccagggagcttccgtgaccgtgtcct |
| | | ccaccactaccccagcaccgaggccacccaccccggctcctaccatcgcctcccagcctctg |
| | | tccctgcgtccggaggcatgtagacccgcagctggtggggccgtgcatacccggggtcttga |
| | | cttcgcctgcgatatctacatttgggcccctctggctggtacttgcggggtcctgctgctttcact |
| | | cgtgatcactctttactgtaagcgcggtcggaagaagctgctgtacatctttaagcaacccttcat |
| | | gaggcctgtgcagactactcaagaggaggacggctgttcatgccggttcccagaggaggag |
| | | gaaggcggctgcgaactgcgcgtgaaattcagccgcagcgcagatgctccagcctacaagc |
| | | aggggcagaaccagctctacaacgaactcaatcttggtcggagagaggagtacgacgtgct |
| | | ggacaagcggagaggacgggacccagaaatgggcgggaagccgcgcagaaagaatccc |
| | | caagagggcctgtacaacgagctccaaaaggataagatggcagaagcctatagcgagattg |
| | | gtatgaaaggggaacgcagaagaggcaaaggccacgacggactgtaccagggactcagc |
| | | accgccaccaaggacacctatgacgctcttcacatgcaggccctgccgcctcgg |
| CAR20-13- | 877 | malpvtalllplalllhaarpdvqmtqspsllsasvgdavtinckasqninrylnwyqqklg |
| Full aa | | egprlliysanslqtgipsrfsgsgsgadftltitspqpedvatyfclqhnswpltfgsgtkleik |
| | | ggggsggggsggggsggggsqvtlkesgpgilqpsqtlsltctftrfslstygmsvgwirqp |
| | | sgkglewladiwwdddkhynpslknrltiskdtsknqaflkitnvdtadtatyycarssttd |
| | | givtyvmdvwgqgasvtvsstttpaprpptpaptiasqplslrpeacrpaaggavhtrgldf |
| | | acdiyiwaplagtcgvlllslvitlyckrgrkkllyifkqpfmrpvqttqeedgcscrfpeeee |
| | | ggcelrvkfsrsadapaykqgqnqlynelnlgrreeydvldkrrgrdpemggkprrknpq |
| | | eglynelqkdkmaeayseigmkgerrrgkghdglyqglstatkdtydalhmqalppr |
| CAR20-14 | 878 | diqmtqspsflsasvgdrvtinckasqninrylnwyqqklgeapklliynanslqtgipsrfs |
| scFv | | gsgsgtdftltisslqpadvatyfclqhnsrpltfgsgtileikggggsggggsggggsggggs |
| domain | | qvtlkesgpgllqpsqtlsltctfagfslnthgmgvgwirqpsgkglewlaniwwdddky |
| | | ynpslknrltmskdtsnnqaflkitnvdtadtatyycariegspvvttvfdywgqgvmvtv |
| | | ss |
| CAR20-14 | 879 | gacatccaaatgacccagtcacctagctttctgtcggcctcggtcggcgacagagtgaccatta |
| scFv | | actgcaaagcgtcccagaacatcaaccgctacctgaattggtaccagcagaagctgggggaa |
| domain nt | | gccccgaagctgctgatctacaacgcgaacagcctccagactggtattccttcccggttctccg |
| | | ggagcggctcgggtaccgatttcaccctcaccatctcctcccttcaacccgctgacgtggcca |
| | | cctacttctgcttgcaacataattctcggcctctgaccttcggaagcggcactatcctcgagatc |
| | | aagggcggtggaggctcaggggggggcggctcgggagggggtggaagcggaggagga |
| | | ggctcccaagtcactcttaaggaatccgggccaggactgttgcagccgagccagaccctgtc |
| | | cctcacttgtaccttcgccggcttttcactgaacacccacggaatgggcgtgggatggattagg |
| | | cagccctcgggaaagggactggagtggctggccaacatttggtgggacgacgacaagtatta |
| | | caacccgagcctcaagaaccgcctgactatgtccaaggatacctccaacaaccaggccttcct |
| | | gaaaatcactaacgtggataccgctgacaccgcaacgtactactgcgcccggatcgaaggtt |
| | | cccccgtcgtgacaactgtgttcgactactggggacagggcgtgatggtgaccgtgtcctcc |
| CAR20-14- | 880 | atggccctccctgtcaccgccctgctgcttccgctggctcttctgctccacgccgctcggcccg |
| Soluble | | acatccaaatgacccagtcacctagctttctgtcggcctcggtcggcgacagagtgaccattaa |
| scFv-nt | | ctgcaaagcgtcccagaacatcaaccgctacctgaattggtaccagcagaagctgggggaa |
| | | gccccgaagctgctgatctacaacgcgaacagcctccagactggtattccttcccggttctccg |
| | | ggagcggctcgggtaccgatttcaccctcaccatctcctcccttcaacccgctgacgtggcca |
| | | cctacttctgcttgcaacataattctcggcctctgaccttcggaagcggcactatcctcgagatc |
| | | aagggcggtggaggctcaggggggggcggctcgggagggggtggaagcggaggagga |
| | | ggctcccaagtcactcttaaggaatccgggccaggactgttgcagccgagccagaccctgtc |
| | | cctcacttgtaccttcgccggcttttcactgaacacccacggaatgggcgtgggatggattagg |
| | | cagccctcgggaaagggactggagtggctggccaacatttggtgggacgacgacaagtatta |
| | | caacccgagcctcaagaaccgcctgactatgtccaaggatacctccaacaaccaggccttcct |
| | | gaaaatcactaacgtggataccgctgacaccgcaacgtactactgcgcccggatcgaaggtt |
| | | cccccgtcgtgacaactgtgttcgactactggggacagggcgtgatggtgaccgtgtcctccg |
| | | gatcgcaccaccatcaccatcatcatcac |
| CAR20-14- | 881 | malpvtalllplalllhaarpdiqmtqspsflsasvgdrvtinckasqninrylnwyqqklge |
| Soluble | | apklliynanslqtgipsrfsgsgsgtdftltisslqpadvatyfclqhnsrpltfgsgtileikgg |
| scFv-aa | | ggsggggsggggsggggsqvtlkesgpgllqpsqtlsltctfagfslnthgmgvgwirqps |
| | | gkglewlaniwwdddkyynpslknrltmskdtsnnqaflkitnvdtadtatyycariegsp |
| | | vvttvfdywgqgvmvtvssgshhhhhhhh |
| CAR20-14- | 882 | atggccctccctgtcaccgccctgctgcttccgctggctcttctgctccacgccgctcggcccg |
| Full nt | | acatccaaatgacccagtcacctagctttctgtcggcctcggtcggcgacagagtgaccattaa |
| | | ctgcaaagcgtcccagaacatcaaccgctacctgaattggtaccagcagaagctgggggaa |
| | | gccccgaagctgctgatctacaacgcgaacagcctccagactggtattccttcccggttctccg |
| | | ggagcggctcgggtaccgatttcaccctcaccatctcctcccttcaacccgctgacgtggcca |
| | | cctacttctgcttgcaacataattctcggcctctgaccttcggaagcggcactatcctcgagatc |
| | | aagggcggtggaggctcaggggggggcggctcgggagggggtggaagcggaggagga |
| | | ggctcccaagtcactcttaaggaatccgggccaggactgttgcagccgagccagaccctgtc |
| | | cctcacttgtaccttcgccggcttttcactgaacacccacggaatgggcgtgggatggattagg |
| | | cagccctcgggaaagggactggagtggctggccaacatttggtgggacgacgacaagtatta |
| | | caacccgagcctcaagaaccgcctgactatgtccaaggatacctccaacaaccaggccttcct |
| | | gaaaatcactaacgtggataccgctgacaccgcaacgtactactgcgcccggatcgaaggtt |
| | | cccccgtcgtgacaactgtgttcgactactggggacagggcgtgatggtgaccgtgtcctcca |
| | | ccactaccccagcaccgaggccacccaccccggctcctaccatcgcctcccagcctctgtcc |
| | | ctgcgtccggaggcatgtagacccgcagctggtggggccgtgcatacccggggtcttgactt |
| | | cgcctgcgatatctacatttgggcccctctggctggtacttgcggggtcctgctgctttcactcgt |
| | | gatcactctttactgtaagcgcggtcggaagaagctgctgtacatctttaagcaacccttcatga |
| | | ggcctgtgcagactactcaagaggaggacggctgttcatgccggttcccagaggaggagga |
| | | aggcggctgcgaactgcgcgtgaaattcagccgcagcgcagatgctccagcctacaagcag |
| | | gggcagaaccagctctacaacgaactcaatcttggtcggagagaggagtacgacgtgctgg |
| | | acaagcggagaggacgggacccagaaatgggcgggaagccgcgcagaaagaatcccca |
| | | agagggcctgtacaacgagctccaaaaggataagatggcagaagcctatagcgagattggta |
| | | tgaaaggggaacgcagaagaggcaaaggccacgacggactgtaccagggactcagcacc |
| | | gccaccaaggacacctatgacgctcttcacatgcaggccctgccgcctcgg |
| CAR20-14- | 883 | malpvtalllplalllhaarpdiqmtqspsflsasvgdrvtinckasqninrylnwyqqklge |
| Full aa | | apklliynanslqtgipsrfsgsgsgtdftltisslqpadvatyfclqhnsrpltfgsgtileikgg |
| | | ggsggggsggggsggggsqvtlkesgpgllqpsqtlsltctfagfslnthgmgvgwirqps |
| | | gkglewlaniwwdddkyynpslknrltmskdtsnnqaflkitnvdtadtatyycariegsp |
| | | vvttvfdywgqgvmvtvsstttpaprpptpaptiasqplslrpeacrpaaggavhtrgldfa |
| | | cdiyiwaplagtcgvlllslvitlyckrgrkkllyifkqpfmrpvqttqeedgcscrfpeeeeg |
| | | gcelrvkfsrsadapaykqgqnqlynelnlgrreeydvldkrrgrdpemggkprrknpqe |
| | | glynelqkdkmaeayseigmkgerrrgkghdglyqglstatkdtydalhmqalppr |
| CAR20-15 | 884 | kivltqsptitaaspgekvtitclassrvsniywyqqksgaspklliystsslasgvpyrfsgsg |
| scFv | | sgtsysltintmeaedaatyychqwssnpwtfgggtklelkggggsggggsggggsggg |
| domain | | gsqvtlkesgpgmlqpsktlsltcsfsgfslstsgmvvswirqpsgkslewlaaiawdgdk |
| | | yynpslksrvtvskdtsntqvflritsvdiadtatyyctrrdydvgyyyfdfwgqgvmvtvss |
| CAR20-15 | 885 | aagattgtgctgacccagagccccactattaccgccgcctccccgggggaaaaggtcaccat |
| scFv | | cacttgtctggcgtcctcacgcgtgtcgaatatctactggtatcagcagaagtccggcgccagc |
| domain nt | | cccaagctgctgatctactcgacctcctccctcgcgtcgggagtgccttaccggttttctggctc |
| | | gggaagcggaaccagctactccttgaccatcaacaccatggaagccgaggacgctgccactt |
| | | actactgccaccagtggtcgagcaacccttggactttcggtggaggcaccaaactcgagctca |
| | | agggcggtggaggctcaggggggggcggctcgggagggggtggaagcggaggaggag |
| | | gctcccaagtcaccctgaaagaatcgggtcccggaatgctgcagccatccaagacgctgtcc |
| | | cttacatgctccttctccgggttcagcctctcaacttccgggatggtggtgtcatggatcagaca |
| | | gccgagcggaaagtccctggagtggctggcggccatcgcatgggatggcgataagtactac |
| | | aacccgagcctgaagtcaagggtcactgtgtccaaggacacctccaacacccaagtgttcctt |
| | | cggatcacctccgtggacattgctgacaccgccacctattactgcactcgccgggactacgac |
| | | gtgggctactactacttcgatttctggggacagggtgtcatggtgaccgtgtcctcc |
| CAR20-15- | 886 | atggccctccctgtcaccgccctgctgcttccgctggctcttctgctccacgccgctcggccca |
| Soluble | | agattgtgctgacccagagccccactattaccgccgcctccccgggggaaaaggtcaccatc |
| scFv-nt | | acttgtctggcgtcctcacgcgtgtcgaatatctactggtatcagcagaagtccggcgccagcc |
| | | ccaagctgctgatctactcgacctcctccctcgcgtcgggagtgccttaccggttttctggctcg |
| | | ggaagcggaaccagctactccttgaccatcaacaccatggaagccgaggacgctgccactta |
| | | ctactgccaccagtggtcgagcaacccttggactttcggtggaggcaccaaactcgagctcaa |
| | | gggcggtggaggctcaggggggggcggctcgggagggggtggaagcggaggaggagg |
| | | ctcccaagtcaccctgaaagaatcgggtcccggaatgctgcagccatccaagacgctgtccct |
| | | tacatgctccttctccgggttcagcctctcaacttccgggatggtggtgtcatggatcagacagc |
| | | cgagcggaaagtccctggagtggctggcggccatcgcatgggatggcgataagtactacaa |
| | | cccgagcctgaagtcaagggtcactgtgtccaaggacacctccaacacccaagtgttccttcg |
| | | gatcacctccgtggacattgctgacaccgccacctattactgcactcgccgggactacgacgt |
| | | gggctactactacttcgatttctggggacagggtgtcatggtgaccgtgtcctccggatcgcac |
| | | caccatcaccatcatcatcac |
| CAR20-15- | 887 | malpvtalllplalllhaarpkivltqsptitaaspgekvtitclassrvsniywyqqksgaspk |
| Soluble | | lliystsslasgvpyrfsgsgsgtsysltintmeaedaatyychqwssnpwtfgggtklelkg |
| scFv-aa | | gggsggggsggggsggggsqvtlkesgpgmlqpsktlsltcsfsgfslstsgmvvswirq |
| | | psgkslewlaaiawdgdkyynpslksrvtvskdtsntqvflritsvdiadtatyyctrrdydv |
| | | gyyyfdfwgqgvmvtvssgshhhhhhhh |
| CAR20-15- | 888 | atggccctccctgtcaccgccctgctgcttccgctggctcttctgctccacgccgctcggccca |
| Full nt | | agattgtgctgacccagagccccactattaccgccgcctccccgggggaaaaggtcaccatc |
| | | acttgtctggcgtcctcacgcgtgtcgaatatctactggtatcagcagaagtccggcgccagcc |
| | | ccaagctgctgatctactcgacctcctccctcgcgtcgggagtgccttaccggttttctggctcg |
| | | ggaagcggaaccagctactccttgaccatcaacaccatggaagccgaggacgctgccactta |
| | | ctactgccaccagtggtcgagcaacccttggactttcggtggaggcaccaaactcgagctcaa |
| | | gggcggtggaggctcaggggggggcggctcgggagggggtggaagcggaggaggagg |
| | | ctcccaagtcaccctgaaagaatcgggtcccggaatgctgcagccatccaagacgctgtccct |
| | | tacatgctccttctccgggttcagcctctcaacttccgggatggtggtgtcatggatcagacagc |
| | | cgagcggaaagtccctggagtggctggcggccatcgcatgggatggcgataagtactacaa |
| | | cccgagcctgaagtcaagggtcactgtgtccaaggacacctccaacacccaagtgttccttcg |
| | | gatcacctccgtggacattgctgacaccgccacctattactgcactcgccgggactacgacgt |
| | | gggctactactacttcgatttctggggacagggtgtcatggtgaccgtgtcctccaccactacc |
| | | ccagcaccgaggccacccaccccggctcctaccatcgcctcccagcctctgtccctgcgtcc |
| | | ggaggcatgtagacccgcagctggtggggccgtgcatacccggggtcttgacttcgcctgcg |
| | | atatctacatttgggcccctctggctggtacttgcggggtcctgctgctttcactcgtgatcactct |
| | | ttactgtaagcgcggtcggaagaagctgctgtacatctttaagcaacccttcatgaggcctgtg |
| | | cagactactcaagaggaggacggctgttcatgccggttcccagaggaggaggaaggcggct |
| | | gcgaactgcgcgtgaaattcagccgcagcgcagatgctccagcctacaagcaggggcaga |
| | | accagctctacaacgaactcaatcttggtcggagagaggagtacgacgtgctggacaagcgg |
| | | agaggacgggacccagaaatgggcgggaagccgcgcagaaagaatccccaagagggcct |
| | | gtacaacgagctccaaaaggataagatggcagaagcctatagcgagattggtatgaaaggg |
| | | gaacgcagaagaggcaaaggccacgacggactgtaccagggactcagcaccgccaccaa |
| | | ggacacctatgacgctcttcacatgcaggccctgccgcctcgg |
| CAR20-15- | 889 | malpvtalllplalllhaarpkivltqsptitaaspgekvtitclassrvsniywyqqksgaspk |
| Full aa | | lliystsslasgvpyrfsgsgsgtsysltintmeaedaatyychqwssnpwtfgggtklelkg |
| | | gggsggggsggggsggggsqvtlkesgpgmlqpsktlsltcsfsgfslstsgmvvswirq |
| | | psgkslewlaaiawdgdkyynpslksrvtvskdtsntqvflritsvdiadtatyyctrrdydv |
| | | gyyyfdfwgqgvmvtvsstttpaprpptpaptiasqplslrpeacrpaaggavhtrgldfac |
| | | diyiwaplagtcgvlllslvitlyckrgrkkllyifkqpfmrpvqttqeedgcscrfpeeeegg |
| | | celrvkfsrsadapaykqgqnqlynelnlgrreeydvldkrrgrdpemggkprrknpqeg |
| | | lynelqkdkmaeayseigmkgerrrgkghdglyqglstatkdtydalhmqalppr |
| CAR20-16 | 890 | niqltqspsrlsasvgdrvtlsckgsqninnylawyqqklgeapklliyntnnlqtgipsrfsg |
| scFv | | sgsgtdytftisglqpedvatyfccqynngntfgagtklelkggggsggggsggggsgggg |
| domain | | sqiqlvqsgpelkkpgesvkisckasgntvtgyamhwvrqapgkglkwmgwintysg |
| | | kptyaddfkgrcvfsleasastahlqisnlknedtatyfcarstyygykdwfaywgqgtlvt |
| | | vss |
| CAR20-16 | 891 | aacatccaactgactcagagccccagccggctgtccgcctccgtgggggacagggtcacac |
| scFv | | tgagctgcaagggttctcagaacatcaacaactacctcgcgtggtaccagcagaagctggga |
| domain nt | | gaggcccccaagctgctcatctacaacaccaacaatctgcaaactggcattccatcgagattct |
| | | caggatcagggtccggtaccgactacaccttcacgatttcgggacttcagcctgaggatgtgg |
| | | ccacctacttctgctgtcagtacaacaacggcaacaccttcggtgctggcaccaagctggaac |
| | | tcaaaggcggtggaggctcaggggggggcggctcgggagggggtggaagcggaggagg |
| | | aggctcccaaattcagttggtgcagtccggcccggagctgaagaagcctggagaatccgtga |
| | | agatctcgtgcaaagcttccgggaacaccgtgaccggatacgcaatgcactgggtccgccag |
| | | gcaccgggaaagggactgaagtggatggggtggatcaacacctacagcggaaagccgact |
| | | tacgccgatgactttaagggacgctgtgtgttctccctggaagcgtccgcctcgactgcccatc |
| | | ttcaaatctccaacctgaagaatgaggacaccgccacttacttctgcgcccggagcacctatta |
| | | cggctacaaggactggttcgcgtattggggccagggcactctcgtgaccgtgtcctcc |
| CAR20-16- | 892 | atggccctccctgtcaccgccctgctgcttccgctggctcttctgctccacgccgctcggccca |
| Soluble | | acatccaactgactcagagccccagccggctgtccgcctccgtgggggacagggtcacact |
| scFv-nt | | gagctgcaagggttctcagaacatcaacaactacctcgcgtggtaccagcagaagctgggag |
| | | aggcccccaagctgctcatctacaacaccaacaatctgcaaactggcattccatcgagattctc |
| | | aggatcagggtccggtaccgactacaccttcacgatttcgggacttcagcctgaggatgtggc |
| | | cacctacttctgctgtcagtacaacaacggcaacaccttcggtgctggcaccaagctggaact |
| | | caaaggcggtggaggctcaggggggggcggctcgggagggggtggaagcggaggagg |
| | | aggctcccaaattcagttggtgcagtccggcccggagctgaagaagcctggagaatccgtga |
| | | agatctcgtgcaaagcttccgggaacaccgtgaccggatacgcaatgcactgggtccgccag |
| | | gcaccgggaaagggactgaagtggatggggtggatcaacacctacagcggaaagccgact |
| | | tacgccgatgactttaagggacgctgtgtgttctccctggaagcgtccgcctcgactgcccatc |
| | | ttcaaatctccaacctgaagaatgaggacaccgccacttacttctgcgcccggagcacctatta |
| | | cggctacaaggactggttcgcgtattggggccagggcactctcgtgaccgtgtcctccggatc |
| | | gcaccaccatcaccatcatcatcac |
| CAR20-16- | 893 | malpvtalllplalllhaarpniqltqspsrlsasvgdrvtlsckgsqninnylawyqqklgea |
| Soluble | | pklliyntnnlqtgipsrfsgsgsgtdytftisglqpedvatyfccqynngntfgagtklelkg |
| scFv-aa | | gggsggggsggggsggggsqiqlvqsgpelkkpgesvkisckasgntvtgyamhwvrq |
| | | apgkglkwmgwintysgkptyaddfkgrcvfsleasastahlqisnlknedtatyfcarsty |
| | | ygykdwfaywgqgtlvtvssgshhhhhhhh |
| CAR20-16- | 894 | atggccctccctgtcaccgccctgctgcttccgctggctcttctgctccacgccgctcggccca |
| Full nt | | acatccaactgactcagagccccagccggctgtccgcctccgtgggggacagggtcacact |
| | | gagctgcaagggttctcagaacatcaacaactacctcgcgtggtaccagcagaagctgggag |
| | | aggcccccaagctgctcatctacaacaccaacaatctgcaaactggcattccatcgagattctc |
| | | aggatcagggtccggtaccgactacaccttcacgatttcgggacttcagcctgaggatgtggc |
| | | cacctacttctgctgtcagtacaacaacggcaacaccttcggtgctggcaccaagctggaact |
| | | caaaggcggtggaggctcaggggggggcggctcgggagggggtggaagcggaggagg |
| | | aggctcccaaattcagttggtgcagtccggcccggagctgaagaagcctggagaatccgtga |
| | | agatctcgtgcaaagcttccgggaacaccgtgaccggatacgcaatgcactgggtccgccag |
| | | gcaccgggaaagggactgaagtggatggggtggatcaacacctacagcggaaagccgact |
| | | tacgccgatgactttaagggacgctgtgtgttctccctggaagcgtccgcctcgactgcccatc |
| | | ttcaaatctccaacctgaagaatgaggacaccgccacttacttctgcgcccggagcacctatta |
| | | cggctacaaggactggttcgcgtattggggccagggcactctcgtgaccgtgtcctccaccac |
| | | taccccagcaccgaggccacccaccccggctcctaccatcgcctcccagcctctgtccctgc |
| | | gtccggaggcatgtagacccgcagctggtggggccgtgcatacccggggtcttgacttcgcc |
| | | tgcgatatctacatttgggcccctctggctggtacttgcggggtcctgctgctttcactcgtgatc |
| | | actctttactgtaagcgcggtcggaagaagctgctgtacatctttaagcaacccttcatgaggcc |
| | | tgtgcagactactcaagaggaggacggctgttcatgccggttcccagaggaggaggaaggc |
| | | ggctgcgaactgcgcgtgaaattcagccgcagcgcagatgctccagcctacaagcaggggc |
| | | agaaccagctctacaacgaactcaatcttggtcggagagaggagtacgacgtgctggacaag |
| | | cggagaggacgggacccagaaatgggcgggaagccgcgcagaaagaatccccaagagg |
| | | gcctgtacaacgagctccaaaaggataagatggcagaagcctatagcgagattggtatgaaa |
| | | ggggaacgcagaagaggcaaaggccacgacggactgtaccagggactcagcaccgccac |
| | | caaggacacctatgacgctcttcacatgcaggccctgccgcctcgg |
| CAR20-16- | 895 | malpvtalllplalllhaarpniqltqspsrlsasvgdrvtlsckgsqninnylawyqqklgea |
| Full aa | | pklliyntnnlqtgipsrfsgsgsgtdytftisglqpedvatyfccqynngntfgagtklelkg |
| | | gggsggggsggggsggggsqiqlvqsgpelkkpgesvkisckasgntvtgyamhwvrq |
| | | apgkglkwmgwintysgkptyaddfkgrcvfsleasastahlqisnlknedtatyfcarsty |
| | | ygykdwfaywgqgtlvtvsstttpaprpptpaptiasqplslrpeacrpaaggavhtrgldf |
| | | acdiyiwaplagtcgvlllslvitlyckrgrkkllyifkqpfmrpvqttqeedgcscrfpeeee |
| | | ggcelrvkfsrsadapaykqgqnqlynelnlgrreeydvldkrrgrdpemggkprrknpq |
| | | eglynelqkdkmaeayseigmkgerrrgkghdglyqglstatkdtydalhmqalppr |

TABLE 11B
Humanized CD20 CAR Constructs

| | SEQ | |
|---|---|---|
| | ID | |
| Name | NO: | Sequence |
| CD20-3m | 691 | QVQLVESGGGVVQPGRSLRLSCAASGFTFRDYYMAWVRQAPGKGL |
| scFv | | EWVASISYEGNPYYGDSVKGRFTISRDNAKSTLYLQMSSLRAEDTAV |
| | | YYCARHDHNNVDWFAYWGQGTLVTVSSGGGGSGGGGSGGGGSGG |
| | | GGSDIVMTQTPLSLSVTPGQPVSMSCKSSQSLLYSENKKNYLAWYL |
| | | QKPGQSPQLLIFWASTRESGVPDRFSGSGSGTDFTLKISRVEAEDVGV |
| | | YYCQQYYNFPTFGQGTKLEIK |
| CD20-3J | 692 | QVQLVQSGAEVKKPGASVKVSCKASGFTFRDYYMAWVRQAPGQRL |
| scFv | | EWMGSISYEGNPYYGDSVKGRVTITRDNSASTLYMELSSLRSEDTAV |
| | | YYCARHDHNNVDWFAYWGQGTLVTVSSGGGGSGGGGSGGGGSGG |
| | | GGSDIQMTQSPSSLSASVGDRVTITCKSSQSLLYSENKKNYLAWYQQ |
| | | KPGKVPKLLIFWASTRESGVPSRFSGSGSGTDFTLTISSLQPEDVATY |
| | | YCQQYYNFPTFGQGTKLEIK |
| CD20- | 693 | EVQLVQSGAEVKKPGESLKISCKGSGFTFRDYYMAWVRQMPGKGL |
| 3H5k3 scFv | | EWMGSISYEGNPYYGDSVKGQVTISRDNSISTLYLQWSSLKASDTA |
| | | MYYCARHDHNNVDWFAYWGQGTLVTVSSGGGGSGGGGSGGGGS |
| | | GGGGSEIVMTQSPATLSLSPGERATLSCKSSQSLLYSENKKNYLAWY |
| | | QQKPGQAPRLLIFWASTRESGIPARFSGSGSGTDFTLTISSLQPEDLAV |
| | | YYCQQYYNFPTFGQGTKLEIK |
| CD20- | 694 | EVQLVQSGAEVKKPGESLKISCKGSGFTFRDYYMAWVRQMPGKGL |
| 3H5k1 scFv | | EWMGSISYEGNPYYGDSVKGQVTISRDNSISTLYLQWSSLKASDTA |
| | | MYYCARHDHNNVDWFAYWGQGTLVTVSSGGGGSGGGGSGGGGS |
| | | GGGGSDIQMTQSPSSLSASVGDRVTITCKSSQSLLYSENKKNYLAWY |
| | | QQKPGKVPKLLIFWASTRESGVPSRFSGSGSGTDFTLTISSLQPEDVA |
| | | TYYCQQYYNFPTFGQGTKLEIK |
| CD20- | 695 | QVQLVQSGAEVKKPGASVKVSCKASGFTFRDYYMAWVRQAPGQG |
| 3H1k3 scFv | | LEWMGSISYEGNPYYGDSVKGRVTMTRDNSTSTLYMELSSLRSEDT |
| | | AVYYCARHDHNNVDWFAYWGQGTLVTVSSGGGGSGGGGSGGGGS |
| | | GGGGSEIVMTQSPATLSLSPGERATLSCKSSQSLLYSENKKNYLAWY |
| | | QQKPGQAPRLLIFWASTRESGIPARFSGSGSGTDFTLTISSLQPEDLAV |
| | | YYCQQYYNFPTFGQGTKLEIK |
| CD20- | 696 | QVQLVQSGAEVKKPGASVKVSCKASGFTFRDYYMAWVRQAPGQG |
| 3H1k1 scFv | | LEWMGSISYEGNPYYGDSVKGRVTMTRDNSTSTLYMELSSLRSEDT |
| | | AVYYCARHDHNNVDWFAYWGQGTLVTVSSGGGGSGGGGSGGGGS |
| | | GGGGSDIQMTQSPSSLSASVGDRVTITCKSSQSLLYSENKKNYLAWY |
| | | QQKPGKVPKLLIFWASTRESGVPSRFSGSGSGTDFTLTISSLQPEDVA |
| | | TYYCQQYYNFPTFGQGTKLEIK |

[1290] In some embodiments, the antigen binding domain comprises a HC CDR1, a HC CDR2, and a HC CDR3 of any heavy chain binding domain amino acid sequences listed in Table 11A and 11B. In embodiments, the antigen binding domain further comprises a LC CDR1, a LC CDR2, and a LC CDR3. In embodiments, the antigen binding domain comprises a LC CDR1, a LC CDR2, and a LC CDR3 of any light chain binding domain amino acid sequences listed in Table 11A and 11B.

[1291] In some embodiments, the antigen binding domain comprises one, two or all of LC CDR1, LC CDR2, and LC CDR3 of any light chain binding domain amino acid sequences listed in Table 11A and 11B, and one, two or all of HC CDR1, HC CDR2, and HC CDR3 of any heavy chain binding domain amino acid sequences listed in Table 11A and 11B.

[1292] In some embodiments, the CDRs are defined according to the Kabat numbering scheme, the Chothia numbering scheme, or a combination thereof.

[1293] The sequences of human CDR sequences of the scFv domains are shown in Table 12A or 12B for the heavy chain variable domains and in Table 13 for the light chain variable domains. “ID” stands for the respective SEQ ID NO for each CDR.

TABLE 12A
Heavy Chain Variable Domain CDRs of CD20 CARs. CDRs are
identified according to the “combined” definition.

| | | SEQ | | SEQ | | SEQ |
|---|---|---|---|---|---|---|
| Candi- | | ID | | ID | | ID |
| date | HCDR1 | NO: | HCDR2 | NO: | HCDR3 | NO: |
| CAR20-1 | EYTFTDYAFH | 697 | WINTYSGKPTYADDFKG | 791 | DWFTY | 903 |
| CAR20-2 | GFTFSKYGMN | 698 | SISSTSIYIYYADTVKG | 792 | HDYSSYSY | 904 |
| CAR20-3 | GFTFRDYYMA | 699 | SISYEGNPYYGDSVKG | 793 | HDHNNVDWFAY | 905 |
| CAR20-4 | RFSLSTYGMSVG | 778 | DIWWDDDKHYNPSLKN | 794 | SSTTDGIVTYVMDV | 906 |
| CAR20-5 | GFTFSSSGMQ | 779 | GIYYDSYKKSYADSVKG | 795 | SAYYGYKDYFDY | 907 |
| CAR20-6 | GFSLNTHGMGVG | 780 | NIWWDDDKYYNPSLKN | 796 | IEGSPVVTTVFDY | 908 |
| CAR20-7 | GFSLSTSGMVVS | 781 | AIAWDGDKYYNPSLKS | 797 | RDYDVGYYYFDF | 909 |
| CAR20-8 | GNTVTGYAMH | 782 | WINTYSGKPTYADDFKG | 798 | DWFAY | 910 |
| CAR20-9 | GFTFRDYYMA | 783 | SISYEGNPYYGDSVKG | 799 | HDHNNVDWFAY | 911 |
| CAR20-10 | GFTFSSSGMQ | 784 | GIYYDSYKKSYADSVKG | 896 | SAYYGYKDYFDY | 912 |
| CAR20-11 | EYTFTDYAFH | 785 | WINTYSGKPTYADDFKG | 897 | GAYYGYRDWFTY | 913 |
| CAR20-12 | GFTFSKYGMN | 786 | SISSTSIYIYYADTVKG | 898 | HDYSSYSY | 914 |
| CAR20-13 | RFSLSTYGMSVG | 787 | DIWWDDDKHYNPSLKN | 899 | SSTTDGIVTYVMDV | 915 |
| CAR20-14 | GFSLNTHGMGVG | 788 | NIWWDDDKYYNPSLKN | 900 | IEGSPVVTTVFDY | 916 |
| CAR20-15 | GFSLSTSGMVVS | 789 | AIAWDGDKYYNPSLKS | 901 | RDYDVGYYYFDF | 917 |
| CAR20-16 | GNTVTGYAMH | 790 | WINTYSGKPTYADDFKG | 902 | STYYGYKDWFAY | 918 |

TABLE 12B
Heavy Chain Variable Domain CDRs of CD20 CARs.
CDRs are identified according to Kabat.

| | | SEQ | | SEQ | | SEQ |
|---|---|---|---|---|---|---|
| Candi- | | ID | | ID | | ID |
| date | HCDR1 | NO: | HCDR2 | NO: | HCDR3 | NO: |
| CAR20-1 | DYAFH | 1481 | WINTYSGKPTYADDFKG | 1497 | GAYYGYRDWFTY | 1513 |
| CAR20-2 | KYGMN | 1482 | SISSTSIYIYYADTVKG | 1498 | HDYSSYSY | 1514 |
| CAR20-3 | DYYMA | 1483 | SISYEGNPYYGDSVKG | 1499 | HDHNNVDWFAY | 1515 |
| CAR20-4 | TYGMSVG | 1484 | DIWWDDDKHYNPSLKN | 1500 | SSTTDGIVTYVMDV | 1516 |
| CAR20-5 | SSGMQ | 1485 | GIYYDSYKKSYADSVKG | 1501 | SAYYGYKDYFDY | 1517 |
| CAR20-6 | THGMGVG | 1486 | NIWWDDDKYYNPSLKN | 1502 | IEGSPVVTTVFDY | 1518 |
| CAR20-7 | TSGMVVS | 1487 | AIAWDGDKYYNPSLKS | 1503 | RDYDVGYYYFDF | 1519 |
| CAR20-8 | GYAMH | 1488 | WINTYSGKPTYADDFKG | 1504 | STYYGYKDWFAY | 1520 |
| CAR20-9 | DYYMA | 1489 | SISYEGNPYYGDSVKG | 1505 | HDHNNVDWFAY | 1521 |
| CAR20-10 | SSGMQ | 1490 | GIYYDSYKKSYADSVKG | 1506 | SAYYGYKDYFDY | 1522 |
| CAR20-11 | DYAFH | 1491 | WINTYSGKPTYADDFKG | 1507 | GAYYGYRDWFTY | 1523 |
| CAR20-12 | KYGMN | 1492 | SISSTSIYIYYADTVKG | 1508 | HDYSSYSY | 1524 |
| CAR20-13 | TYGMSVG | 1493 | DIWWDDDKHYNPSLKN | 1509 | SSTTDGIVTYVMDV | 1525 |
| CAR20-14 | THGMGVG | 1494 | NIWWDDDKYYNPSLKN | 1510 | IEGSPVVTTVFDY | 1526 |
| CAR20-15 | TSGMVVS | 1495 | AIAWDGDKYYNPSLKS | 1511 | RDYDVGYYYFDF | 1527 |
| CAR20-16 | GYAMH | 1496 | WINTYSGKPTYADDFKG | 1512 | STYYGYKDWFAY | 1528 |

TABLE 13
Light Chain Variable Domain CDRs of CD20 CARs.
The LC CDR sequences in this table have the same
sequence under the Kabat or combined definitions.

| | | SEQ | | SEQ | | SEQ |
|---|---|---|---|---|---|---|
| | | ID | | ID | | ID |
| Candidate | LCDR1 | NO: | LCDR2 | NO: | LCDR3 | NO: |
| CAR20-1 | KSSQSLLYSENKKNYLA | 919 | WASTRES | 935 | QQYYNFPPWT | 951 |
| CAR20-2 | KINSGNIGSYFIH | 920 | RDDKRPH | 936 | HSYDSGINIV | 952 |
| CAR20-3 | KSSQSLLYSENKKNYLA | 921 | WASTRES | 937 | QQYYNFPT | 953 |
| CAR20-4 | KASQNINRYLN | 922 | SANSLQT | 938 | LQHNSWPLT | 954 |
| CAR20-5 | QASQNINKYIA | 923 | YTSTLES | 939 | LQYDDLPYT | 955 |
| CAR20-6 | KASQNINRYLN | 924 | NANSLQT | 940 | LQHNSRPLT | 956 |
| CAR20-7 | LASSRVSNIY | 925 | STSSLAS | 941 | HQWSSNPWT | 957 |
| CAR20-8 | KGSQNINNYLA | 926 | NTNNLQT | 942 | CQYNNGNT | 958 |
| CAR20-9 | KSSQSLLYSENKKNYLA | 927 | WASTRES | 943 | QQYYNFPT | 959 |
| CAR20-10 | QASQNINKYIA | 928 | YTSTLES | 944 | LQYDDLPYT | 960 |
| CAR20-11 | KSSQSLLYSENKKNYLA | 929 | WASTRES | 945 | QQYYNFPPWT | 961 |
| CAR20-12 | KINSGNIGSYFIH | 930 | RDDKRPH | 946 | HSYDSGINIV | 962 |
| CAR20-13 | KASQNINRYLN | 931 | SANSLQT | 947 | LQHNSWPLT | 963 |
| CAR20-14 | KASQNINRYLN | 932 | NANSLQT | 948 | LQHNSRPLT | 964 |
| CAR20-15 | LASSRVSNIY | 933 | STSSLAS | 949 | HQWSSNPWT | 965 |
| CAR20-16 | KGSQNINNYLA | 934 | NTNNLQT | 950 | CQYNNGNT | 966 |

TABLE 14A
Heavy Chain Variable Regions of CD20 antibody molecules

| Candi- | SEQ ID | |
|---|---|---|
| date | NO: | Heavy Chain Variable region |
| CAR-1 | 967 | QIQLVQSGPELKKPGESVKISCKTSEYTFTDYAFHWVKQAPGKGLK |
| | | WMGWINTYSGKPTYADDFKGRFVFSLEDSARTANLQISNLKNEDTA |
| | | TYFCARGAYYGYRDWFTYWGQGTLVTV |
| CAR20-2 | 968 | EVQLVESGGGLVQPGRSLKLSCLASGFTFSKYGMNWIRQAPGKGLE |
| | | WVASISSTSIYIYYADTVKGRFTISRENAKNTLYLQMTSLRSEDTALY |
| | | YCARHDYSSYSYWGQGVMVTV |
| CAR20-3 | 969 | EVQLVESGGGLVQPGRSLKLSCAASGFTFRDYYMAWVRQAPKKGL |
| | | EWVASISYEGNPYYGDSVKGRFTISRNNAKSTLYLQMNSLRSEDTAT |
| | | YYCARHDHNNVDWFAYWGQGTLVTV |
| CAR20-4 | 970 | QVTLKESGPGILQPSQTLSLTCTFTRFSLSTYGMSVGWIRQPSGKGLE |
| | | WLADIWWDDDKHYNPSLKNRLTISKDTSKNQAFLKITNVDTADTAT |
| | | YYCARSSTTDGIVTYVMDVWGQGASVTV |
| CAR20-5 | 971 | EVQLVESGGGLVQPGTSLKLSCVASGFTFSSSGMQWIRQAPKKGLE |
| | | WISGIYYDSYKKSYADSVKGRFTISRDNSKNTLYLEMNSLRSEDTAT |
| | | YYCAKSAYYGYKDYFDYWGQGVMVTV |
| CAR20-6 | 972 | QVTLKESGPGLLQPSQTLSLTCTFAGFSLNTHGMGVGWIRQPSGKGL |
| | | EWLANIWWDDDKYYNPSLKNRLTMSKDTSNNQAFLKITNVDTADT |
| | | ATYYCARIEGSPVVTTVFDYWGQGVMVTV |
| CAR20-7 | 973 | QVTLKESGPGMLQPSKTLSLTCSFSGFSLSTSGMVVSWIRQPSGKSLE |
| | | WLAAIAWDGDKYYNPSLKSRVTVSKDTSNTQVFLRITSVDIADTATY |
| | | YCTRRDYDVGYYYFDFWGQGVMVTV |
| CAR20-8 | 974 | QIQLVQSGPELKKPGESVKISCKASGNTVTGYAMHWVRQAPGKGLK |
| | | WMGWINTYSGKPTYADDFKGRCVFSLEASASTAHLQISNLKNEDTA |
| | | TYFCARSTYYGYKDWFAYWGQGTLVTV |
| CAR20-9 | 975 | EVQLVESGGGLVQPGRSLKLSCAASGFTFRDYYMAWVRQAPKKGL |
| | | EWVASISYEGNPYYGDSVKGRFTISRNNAKSTLYLQMNSLRSEDTAT |
| | | YYCARHDHNNVDWFAYWGQGTLVTV |
| CAR20-10 | 976 | EVQLVESGGGLVQPGTSLKLSCVASGFTFSSSGMQWIRQAPKKGLE |
| | | WISGIYYDSYKKSYADSVKGRFTISRDNSKNTLYLEMNSLRSEDTAT |
| | | YYCAKSAYYGYKDYFDYWGQGVMVTV |
| CAR20-11 | 977 | QIQLVQSGPELKKPGESVKISCKTSEYTFTDYAFHWVKQAPGKGLK |
| | | WMGWINTYSGKPTYADDFKGRFVFSLEDSARTANLQISNLKNEDTA |
| | | TYFCARGAYYGYRDWFTYWGQGTLVTV |
| CAR20-12 | 978 | EVQLVESGGGLVQPGRSLKLSCLASGFTFSKYGMNWIRQAPGKGLE |
| | | WVASISSTSIYIYYADTVKGRFTISRENAKNTLYLQMTSLRSEDTALY |
| | | YCARHDYSSYSYWGQGVMVTV |
| CAR20-13 | 979 | QVTLKESGPGILQPSQTLSLTCTFTRFSLSTYGMSVGWIRQPSGKGLE |
| | | WLADIWWDDDKHYNPSLKNRLTISKDTSKNQAFLKITNVDTADTAT |
| | | YYCARSSTTDGIVTYVMDVWGQGASVTV |
| CAR20-14 | 980 | QVTLKESGPGLLQPSQTLSLTCTFAGFSLNTHGMGVGWIRQPSGKGL |
| | | EWLANIWWDDDKYYNPSLKNRLTMSKDTSNNQAFLKITNVDTADT |
| | | ATYYCARIEGSPVVTTVFDYWGQGVMVTV |
| CAR20-15 | 981 | QVTLKESGPGMLQPSKTLSLTCSFSGFSLSTSGMVVSWIRQPSGKSLE |
| | | WLAAIAWDGDKYYNPSLKSRVTVSKDTSNTQVFLRITSVDIADTATY |
| | | YCTRRDYDVGYYYFDFWGQGVMVTV |
| CAR20-16 | 982 | QIQLVQSGPELKKPGESVKISCKASGNTVTGYAMHWVRQAPGKGLK |
| | | WMGWINTYSGKPTYADDFKGRCVFSLEASASTAHLQISNLKNEDTA |
| | | TYFCARSTYYGYKDWFAYWGQGTLVTV |

TABLE 14B
Heavy Chain Variable Regions of Humanized
CD20 antibody molecules

| | SEQ | |
|---|---|---|
| | ID | |
| Candidate | NO: | Heavy Chain Variable region |
| CD20- | 983 | QVQLVQSGAEVKKPGASVKVSCKASGFTFRDYYMAWVRQAPGQG |
| 3_VH1_1-46 | | LEWMGSISYEGNPYYGDSVKGRVTMTRDNSTSTLYMELSSLRSED |
| | | TAVYYCARHDHNNVDWFAYWGQGTLVTVSS |
| CD20- | 984 | EVQLVQSGAEVKKPGESLKISCKGSGFTFRDYYMAWVRQMPGKG |
| 3_VH5_5-51 | | LEWMGSISYEGNPYYGDSVKGQVTISRDNSISTLYLQWSSLKASDT |
| | | AMYYCARHDHNNVDWFAYWGQGTLVTVSS |
| CD20-3_VH | 985 | QVQLVESGGGVVQPGRSLRLSCAASGFTFRDYYMAWVRQAPGKG |
| M | | LEWVASISYEGNPYYGDSVKGRFTISRDNAKSTLYLQMSSLRAEDT |
| | | AVYYCARHDHNNVDWFAYWGQGTLVTVSS |
| CD20-3_VH | 986 | QVQLVQSGAEVKKPGASVKVSCKASGFTFRDYYMAWVRQAPGQR |
| J | | LEWMGSISYEGNPYYGDSVKGRVTITRDNSASTLYMELSSLRSEDT |
| | | AVYYCARHDHNNVDWFAYWGQGTLVTVSS |

TABLE 15A
Light Chain Variable Regions of CD20 antibody molecules

| Candi- | SEQ ID | |
|---|---|---|
| date | NO: | Light Chain Variable region |
| CAR20-1 | 987 | DIVMTQTPSSQAVSAGEKVTMSCKSSQSLLYSENKKNYLAWYQQKPG |
| | | QSPKLLIYWASTRESGVPDRFIGSGSGTDFTLTISSVQAEDLAVYYCQQ |
| | | YYNFPPWTFGGGTKLELK |
| CAR20-2 | 988 | QVVLTQPKSVSTSLESTVKLSCKINSGNIGSYFIHWYQQHEGRSPTTMI |
| | | YRDDKRPHGVPDRFSGSIDSSSNSAFLTINNVQTEDEAIYFCHSYDSGIN |
| | | IVFGGGTKLTVL |
| CAR20-3 | 989 | DIVMTQTPSSQAVSAGEKVTMSCKSSQSLLYSENKKNYLAWYQQKPG |
| | | QSPKLLIFWASTRESGVPDRFIGSGSGTDFTLTISSVQAEDLAVYYCQQ |
| | | YYNFPTFGSGTKLEIK |
| CAR20-4 | 990 | DVQMTQSPSLLSASVGDAVTINCKASQNINRYLNWYQQKLGEGPRLLI |
| | | YSANSLQTGIPSRFSGSGSGADFTLTITSPQPEDVATYFCLQHNSWPLTF |
| | | GSGTKLEIK |
| CAR20-5 | 991 | DIQMTQSPPSLSASLGDKVTITCQASQNINKYIAWYQQKPGKAPRLLIR |
| | | YTSTLESGTPSRFSGSGSGRDYSFSISNVESGDVASYYCLQYDDLPYTF |
| | | GPGTKLELK |
| CAR20-6 | 992 | DIQMTQSPSFLSASVGDRVTINCKASQNINRYLNWYQQKLGEAPKLLI |
| | | YNANSLQTGIPSRFSGSGSGTDFTLTISSLQPADVATYFCLQHNSRPLTF |
| | | GSGTILEIK |
| CAR20-7 | 993 | KIVLTQSPTITAASPGEKVTITCLASSRVSNIYWYQQKSGASPKLLIYSTS |
| | | SLASGVPYRFSGSGSGTSYSLTINTMEAEDAATYYCHQWSSNPWTFGG |
| | | GTKLELK |
| CAR20-8 | 994 | NIQLTQSPSRLSASVGDRVTLSCKGSQNINNYLAWYQQKLGEAPKLLI |
| | | YNTNNLQTGIPSRFSGSGSGTDYTFTISGLQPEDVATYFCCQYNNGNTF |
| | | GAGTKLELK |
| CAR20-9 | 995 | DIVMTQTPSSQAVSAGEKVTMSCKSSQSLLYSENKKNYLAWYQQKPG |
| | | QSPKLLIFWASTRESGVPDRFIGSGSGTDFTLTISSVQAEDLAVYYCQQ |
| | | YYNFPTFGSGTKLEIK |
| CAR20-10 | 996 | DIQMTQSPPSLSASLGDKVTITCQASQNINKYIAWYQQKPGKAPRLLIR |
| | | YTSTLESGTPSRFSGSGSGRDYSFSISNVESGDVASYYCLQYDDLPYTF |
| | | GPGTKLELK |
| CAR20-11 | 997 | DIVMTQTPSSQAVSAGEKVTMSCKSSQSLLYSENKKNYLAWYQQKPG |
| | | QSPKLLIYWASTRESGVPDRFIGSGSGTDFTLTISSVQAEDLAVYYCQQ |
| | | YYNFPPWTFGGGTKLELK |
| CAR20-12 | 998 | QVVLTQPKSVSTSLESTVKLSCKINSGNIGSYFIHWYQQHEGRSPTTMI |
| | | YRDDKRPHGVPDRFSGSIDSSSNSAFLTINNVQTEDEAIYFCHSYDSGIN |
| | | IVFGGGTKLTVL |
| CAR20-13 | 999 | DVQMTQSPSLLSASVGDAVTINCKASQNINRYLNWYQQKLGEGPRLLI |
| | | YSANSLQTGIPSRFSGSGSGADFTLTITSPQPEDVATYFCLQHNSWPLTF |
| | | GSGTKLEIK |
| CAR20-14 | 1000 | DIQMTQSPSFLSASVGDRVTINCKASQNINRYLNWYQQKLGEAPKLLI |
| | | YNANSLQTGIPSRFSGSGSGTDFTLTISSLQPADVATYFCLQHNSRPLTF |
| | | GSGTILEIK |
| CAR20-15 | 1001 | KIVLTQSPTITAASPGEKVTITCLASSRVSNIYWYQQKSGASPKLLIYSTS |
| | | SLASGVPYRFSGSGSGTSYSLTINTMEAEDAATYYCHQWSSNPWTFGG |
| | | GTKLELK |
| CAR20-16 | 1002 | NIQLTQSPSRLSASVGDRVTLSCKGSQNINNYLAWYQQKLGEAPKLLI |
| | | YNTNNLQTGIPSRFSGSGSGTDYTFTISGLQPEDVATYFCCQYNNGNTF |
| | | GAGTKLELK |

TABLE 15B
Light Chain Variable Regions of Humanized
CD20 antibody molecules

| | SEQ | |
|---|---|---|
| | ID | |
| Candidate | NO: | Light Chain Variable region |
| CD20- | 1003 | DIQMTQSPSSLSASVGDRVTITCKSSQSLLYSENKKNYLAWYQQK |
| 3_VK1_A20 | | PGKVPKLLIFWASTRESGVPSRFSGSGSGTDFTLTISSLQPEDVATY |
| | | YCQQYYNFPTFGQGTKLEIK |
| CD20- | 1004 | EIVMTQSPATLSLSPGERATLSCKSSQSLLYSENKKNYLAWYQQK |
| 3_VK3_L25 | | PGQAPRLLIFWASTRESGIPARFSGSGSGTDFTLTISSLQPEDLAVY |
| | | YCQQYYNFPTFGQGTKLEIK |
| CD20-3_VL M | 1005 | DIVMTQTPLSLSVTPGQPVSMSCKSSQSLLYSENKKNYLAWYLQK |
| and CD20- | | PGQSPQLLIFWASTRESGVPDRFSGSGSGTDFTLKISRVEAEDVGV |
| 3_VL J | | YYCQQYYNFPTFGQGTKLEIK |

[1294] In some embodiments, the antigen binding domain comprises a HC CDR1, a HC CDR2, and a HC CDR3 of any heavy chain binding domain amino acid sequences listed in Table 14A or 14B. In embodiments, the antigen binding domain further comprises a LC CDR1, a LC CDR2, and a LC CDR3. In embodiments, the antigen binding domain comprises a LC CDR1, a LC CDR2, and a LC CDR3 of any light chain binding domain amino acid sequences listed in Table 15A or 15B.

[1295] In some embodiments, the antigen binding domain comprises one, two or all of LC CDR1, LC CDR2, and LC CDR3 of any light chain binding domain amino acid sequences listed in Table 15A or 15B, and one, two or all of HC CDR1, HC CDR2, and HC CDR3 of any heavy chain binding domain amino acid sequences listed in Table 14A or 14B.

[1296] In some embodiments, the CDRs are defined according to the Kabat numbering scheme, the Chothia numbering scheme, or a combination thereof.

### CAR123 Constructs

[1297] Anti-CD123 single chain variable fragments were isolated. Anti-CD123 scFvs were cloned into lentiviral CAR expression vectors with the CD3zeta chain and the 4-1BB costimulatory molecule. CAR-containing plasmids were amplified by bacterial transformation in STBL3 cells, followed by Maxiprep using endotoxin-free Qiagen Plasmid Maki kit. Lentiviral supernatant was produced in 293T cells using standard techniques.

[1298] The sequences of the CARs are provided below in Table 16. Additional components of CARs (e.g., leader, hinge, transmembrane, and signalling domains) are described herein.

[1299] The order in which the VL and VH domains appear in the scFv was varied (i.e., VL-VH, or VH-VL orientation), and where either three or four copies of the “G4S” (SEQ ID NO:18) subunit, in which each subunit comprises the sequence GGGGS (SEQ ID NO:18) (e.g., (G4S)₃ (SEQ ID NO:107) or (G4S)₄ (SEQ ID NO:10⁶)), connect the variable domains to create the entirety of the scFv domain.

[1300] The sequences of the human CARs are provided below in Table 16.

[1301] These clones all contained a Q/K residue change in the signal domain of the co-stimulatory domain derived from CD3zeta chain.

TABLE 16
Human CD123 CAR Constructs

| | SEQ | |
|---|---|---|
| Name | ID | Sequence |
| CAR123-1 | 1123 | atggccctccctgtcaccgccctgctgcttccgctggctcttctgctccacgccgc |
| NT | | tcggccccaagtccaactcgtccagtcaggagcggaagtcaagaagcccggagcgt |
| | | cagtcaaagtgtcatgcaaagcctcgggctacactttcactgggtactacatgcac |
| | | tgggtgcgccaggctccaggacagggactggaatggatgggatggatcaacccgaa |
| | | ctccggtggcaccaattacgcccagaagttccaggggagggtgaccatgactcgcg |
| | | acacgtcgatcagcaccgcatacatggagctgtcaagactccggtccgacgatact |
| | | gccgtgtactactgcgcacgggacatgaacattctggccaccgtgccttttgacat |
| | | ctggggtcagggaactatggttaccgtgtcctctggtggaggcggctccggcgggg |
| | | ggggaagcggaggcggtggaagcgacattcagatgacccagtcgccttcatccctt |
| | | tcggcgagcgtgggagatcgcgtcactatcacttgtcgggcctcgcagtccatctc |
| | | cacctacctcaattggtaccagcagaagccaggaaaagcaccgaatctgctgatct |
| | | acgccgcgttttccttgcaatcgggagtgccaagcagattcagcggatcgggatca |
| | | ggcactgatttcaccctcaccatcaactcgctgcaaccggaggatttcgctacgta |
| | | ctattgccaacaaggagacagcgtgccgctcaccttcggcggagggactaagctgg |
| | | aaatcaagaccactaccccagcaccgaggccacccaccccggctcctaccatcgcc |
| | | tcccagcctctgtccctgcgtccggaggcatgtagacccgcagctggtggggccgt |
| | | gcatacccggggtcttgacttcgcctgcgatatctacatttgggcccctctggctg |
| | | gtacttgcggggtcctgctgctttcactcgtgatcactctttactgtaagcgcggt |
| | | cggaagaagctgctgtacatctttaagcaacccttcatgaggcctgtgcagactac |
| | | tcaagaggaggacggctgttcatgccggttcccagaggaggaggaaggcggctgcg |
| | | aactgcgcgtgaaattcagccgcagcgcagatgctccagcctacaagcaggggcag |
| | | aaccagctctacaacgaactcaatcttggtcggagagaggagtacgacgtgctgga |
| | | caagcggagaggacgggacccagaaatgggcgggaagccgcgcagaaagaatcccc |
| | | aagagggcctgtacaacgagctccaaaaggataagatggcagaagcctatagcgag |
| | | attggtatgaaaggggaacgcagaagaggcaaaggccacgacggactgtaccaggg |
| | | actcagcaccgccaccaaggacacctatgacgctcttcacatgcaggccctgccgc |
| | | ctcgg |
| CAR123-1 | 1124 | MALPVTALLLPLALLLHAARPQVQLVQSGAEVKKPGASVKVSCKASGYTFTGYYMHWVRQAP |
| AA | | GQGLEWMGWINPNSGGTNYAQKFQGRVTMTRDTSISTAYMELSRLRSDDTAVYYCARDMNIL |
| | | ATVPFDIWGQGTMVTVSSGGGGSGGGGSGGGGSDIQMTQSPSSLSASVGDRVTITCRASQSI |
| | | STYLNWYQQKPGKAPNLLIYAAFSLQSGVPSRFSGSGSGTDFTLTINSLQPEDFATYYCQQG |
| | | DSVPLTFGGGTKLEIKTTTPAPRPPTPAPTIASQPLSLRPEACRPAAGGAVHTRGLDFACDI |
| | | YIWAPLAGTCGVLLLSLVITLYCKRGRKKLLYIFKQPFMRPVQTTQEEDGCSCRFPEEEEGG |
| | | CELRVKFSRSADAPAYKQGQNQLYNELNLGRREEYDVLDKRRGRDPEMGGKPRRKNPQEGLY |
| | | NELQKDKMAEAYSEIGMKGERRRGKGHDGLYQGLSTATKDTYDALHMQALPPR |
| CAR123-1 | 1125 | MALPVTALLLPLALLLHAARPQVQLVQSGAEVKKPGASVKVSCKASGYTFTGYYMHWVRQAP |
| scFv | | GQGLEWMGWINPNSGGTNYAQKFQGRVTMTRDTSISTAYMELSRLRSDDTAVYYCARDMNIL |
| | | ATVPFDIWGQGTMVTVSSGGGGSGGGGSGGGGSDIQMTQSPSSLSASVGDRVTITCRASQSI |
| | | STYLNWYQQKPGKAPNLLIYAAFSLQSGVPSRFSGSGSGTDFTLTINSLQPEDFATYYCQQG |
| | | DSVPLTFGGGTKLEIK |
| CAR123-1 | 1126 | QVQLVQSGAEVKKPGASVKVSCKASGYTFTGYYMHWVRQAPGQGLEWMGWINPNSGGTNYAQ |
| VH | | KFQGRVTMTRDTSISTAYMELSRLRSDDTAVYYCARDMNILATVPFDIWGQGTMVTVSS |
| CAR123-1 | 1127 | DIQMTQSPSSLSASVGDRVTITCRASQSISTYLNWYQQKPGKAPNLLIYAAFSLQSGVPSRF |
| VL | | SGSGSGTDFTLTINSLQPEDFATYYCQQGDSVPLTFGGGTKLEIK |
| CAR123-2 | 1128 | atggccctccctgtcaccgccctgctgcttccgctggctcttctgctccacgccgctcggcc |
| NT | | ccaagtgcaactcgtccaaagcggagcggaagtcaagaaacccggagcgagcgtgaaagtgt |
| | | cctgcaaagcctccggctacacctttacgggctactacatgcactgggtgcgccaggcacca |
| | | ggacagggtcttgaatggatgggatggatcaaccctaattcgggcggaactaactacgcaca |
| | | gaagttccaggggagagtgactctgactcgggatacctccatctcaactgtctacatggaac |
| | | tctcccgcttgcggtcagatgatacggcagtgtactactgcgcccgcgacatgaatatcctg |
| | | gctaccgtgccgttcgacatctggggacaggggactatggttactgtctcatcgggcggtgg |
| | | aggttcaggaggaggcggctcgggaggcggaggttcggacattcagatgacccagtccccat |
| | | cctctctgtcggccagcgtcggagatagggtgaccattacctgtcgggcctcgcaaagcatc |
| | | tcctcgtacctcaactggtatcagcaaaagccgggaaaggcgcctaagctgctgatctacgc |
| | | cgcttcgagcttgcaaagcggggtgccatccagattctcgggatcaggctcaggaaccgact |
| | | tcaccctgaccgtgaacagcctccagccggaggactttgccacttactactgccagcaggga |
| | | gactccgtgccgcttactttcggggggggtacccgcctggagatcaagaccactaccccagc |
| | | accgaggccacccaccccggctcctaccatcgcctcccagcctctgtccctgcgtccggagg |
| | | catgtagacccgcagctggtggggccgtgcatacccggggtcttgacttcgcctgcgatatc |
| | | tacatttgggcccctctggctggtacttgcggggtcctgctgctttcactcgtgatcactct |
| | | ttactgtaagcgcggtcggaagaagctgctgtacatctttaagcaacccttcatgaggcctg |
| | | tgcagactactcaagaggaggacggctgttcatgccggttcccagaggaggaggaaggcggc |
| | | tgcgaactgcgcgtgaaattcagccgcagcgcagatgctccagcctacaagcaggggcagaa |
| | | ccagctctacaacgaactcaatcttggtcggagagaggagtacgacgtgctggacaagcgga |
| | | gaggacgggacccagaaatgggcgggaagccgcgcagaaagaatccccaagagggcctgtac |
| | | aacgagctccaaaaggataagatggcagaagcctatagcgagattggtatgaaaggggaacg |
| | | cagaagaggcaaaggccacgacggactgtaccagggactcagcaccgccaccaaggacacct |
| | | atgacgctcttcacatgcaggccctgccgcctcgg |
| CAR123-2 | 1129 | MALPVTALLLPLALLLHAARPQVQLVQSGAEVKKPGASVKVSCKASGYTFTGYYMHWVRQAP |
| AA | | GQGLEWMGWINPNSGGTNYAQKFQGRVTLTRDTSISTVYMELSRLRSDDTAVYYCARDMNIL |
| | | ATVPFDIWGQGTMVTVSSGGGGSGGGGSGGGGSDIQMTQSPSSLSASVGDRVTITCRASQSI |
| | | SSYLNWYQQKPGKAPKLLIYAASSLQSGVPSRFSGSGSGTDFTLTVNSLQPEDFATYYCQQG |
| | | DSVPLTFGGGTRLEIKTTTPAPRPPTPAPTIASQPLSLRPEACRPAAGGAVHTRGLDFACDI |
| | | YIWAPLAGTCGVLLLSLVITLYCKRGRKKLLYIFKQPFMRPVQTTQEEDGCSCRFPEEEEGG |
| | | CELRVKFSRSADAPAYKQGQNQLYNELNLGRREEYDVLDKRRGRDPEMGGKPRRKNPQEGLY |
| | | NELQKDKMAEAYSEIGMKGERRRGKGHDGLYQGLSTATKDTYDALHMQALPPR |
| CAR123-2 | 1130 | MALPVTALLLPLALLLHAARPQVQLVQSGAEVKKPGASVKVSCKASGYTFTGYYMHWVRQAP |
| scFv | | GQGLEWMGWINPNSGGTNYAQKFQGRVTLTRDTSISTVYMELSRLRSDDTAVYYCARDMNIL |
| | | ATVPFDIWGQGTMVTVSSGGGGSGGGGSGGGGSDIQMTQSPSSLSASVGDRVTITCRASQSI |
| | | SSYLNWYQQKPGKAPKLLIYAASSLQSGVPSRFSGSGSGTDFTLTVNSLQPEDFATYYCQQG |
| | | DSVPLTFGGGTRLEIK |
| CAR123-2 | 1131 | QVQLVQSGAEVKKPGASVKVSCKASGYTFTGYYMHWVRQAPGQGLEWMGWINPNSGGTNYAQ |
| VH | | KFQGRVTLTRDTSISTVYMELSRLRSDDTAVYYCARDMNILATVPFDIWGQGTMVTVSS |
| CAR123-2 | 1132 | DIQMTQSPSSLSASVGDRVTITCRASQSISSYLNWYQQKPGKAPKLLIYAASSLQSGVPSRF |
| VL | | SGSGSGTDFTLTVNSLQPEDFATYYCQQGDSVPLTFGGGTRLEIK |
| CAR123-3 | 1133 | atggccctccctgtcaccgccctgctgcttccgctggctcttctgctccacgccgctcggcc |
| NT | | ccaagtccaactcgttcaatccggcgcagaagtcaagaagccaggagcatcagtgaaagtgt |
| | | cctgcaaagcctcaggctacatcttcacgggatactacatccactgggtgcgccaggctccg |
| | | ggccagggccttgagtggatgggctggatcaaccctaactctgggggaaccaactacgctca |
| | | gaagttccaggggagggtcactatgactcgcgatacctccatctccactgcgtacatggaac |
| | | tctcgggactgagatccgacgatcctgccgtgtactactgcgcccgggacatgaacatcttg |
| | | gcgaccgtgccgtttgacatttggggacagggcaccctcgtcactgtgtcgagcggtggagg |
| | | aggctcggggggtggcggatcaggagggggaggaagcgacatccagctgactcagagcccat |
| | | cgtcgttgtccgcgtcggtgggggatagagtgaccattacttgccgcgccagccagagcatc |
| | | tcatcatatctgaattggtaccagcagaagcccggaaaggccccaaaactgctgatctacgc |
| | | tgcaagcagcctccaatcgggagtgccgtcacggttctccgggtccggttcgggaactgact |
| | | ttaccctgaccgtgaattcgctgcaaccggaggatttcgccacgtactactgtcagcaagga |
| | | gactccgtgccgctgaccttcggtggaggcaccaaggtcgaaatcaagaccactaccccagc |
| | | accgaggccacccaccccggctcctaccatcgcctcccagcctctgtccctgcgtccggagg |
| | | catgtagacccgcagctggtggggccgtgcatacccggggtcttgacttcgcctgcgatatc |
| | | tacatttgggcccctctggctggtacttgcggggtcctgctgctttcactcgtgatcactct |
| | | ttactgtaagcgcggtcggaagaagctgctgtacatctttaagcaacccttcatgaggcctg |
| | | tgcagactactcaagaggaggacggctgttcatgccggttcccagaggaggaggaaggcggc |
| | | tgcgaactgcgcgtgaaattcagccgcagcgcagatgctccagcctacaagcaggggcagaa |
| | | ccagctctacaacgaactcaatcttggtcggagagaggagtacgacgtgctggacaagcgga |
| | | gaggacgggacccagaaatgggcgggaagccgcgcagaaagaatccccaagagggcctgtac |
| | | aacgagctccaaaaggataagatggcagaagcctatagcgagattggtatgaaaggggaacg |
| | | cagaagaggcaaaggccacgacggactgtaccagggactcagcaccgccaccaaggacacct |
| | | atgacgctcttcacatgcaggccctgccgcctcgg |
| CAR123-3 | 1134 | MALPVTALLLPLALLLHAARPQVQLVQSGAEVKKPGASVKVSCKASGYIFTGYYIHWVRQAP |
| AA | | GQGLEWMGWINPNSGGTNYAQKFQGRVTMTRDTSISTAYMELSGLRSDDPAVYYCARDMNIL |
| | | ATVPFDIWGQGTLVTVSSGGGGSGGGGSGGGGSDIQLTQSPSSLSASVGDRVTITCRASQSI |
| | | SSYLNWYQQKPGKAPKLLIYAASSLQSGVPSRFSGSGSGTDFTLTVNSLQPEDFATYYCQQG |
| | | DSVPLTFGGGTKVEIKTTTPAPRPPTPAPTIASQPLSLRPEACRPAAGGAVHTRGLDFACDI |
| | | YIWAPLAGTCGVLLLSLVITLYCKRGRKKLLYIFKQPFMRPVQTTQEEDGCSCRFPEEEEGG |
| | | CELRVKFSRSADAPAYKQGQNQLYNELNLGRREEYDVLDKRRGRDPEMGGKPRRKNPQEGLY |
| | | NELQKDKMAEAYSEIGMKGERRRGKGHDGLYQGLSTATKDTYDALHMQALPPR |
| CAR123-3 | 1135 | MALPVTALLLPLALLLHAARPQVQLVQSGAEVKKPGASVKVSCKASGYIFTGYYIHWVRQAP |
| scFv | | GQGLEWMGWINPNSGGTNYAQKFQGRVTMTRDTSISTAYMELSGLRSDDPAVYYCARDMNIL |
| | | ATVPFDIWGQGTLVTVSSGGGGSGGGGSGGGGSDIQLTQSPSSLSASVGDRVTITCRASQSI |
| | | SSYLNWYQQKPGKAPKLLIYAASSLQSGVPSRFSGSGSGTDFTLTVNSLQPEDFATYYCQQG |
| | | DSVPLTFGGGTKVEIK |
| CAR123-3 | 1136 | QVQLVQSGAEVKKPGASVKVSCKASGYIFTGYYIHWVRQAPGQGLEWMGWINPNSGGTNYAQ |
| VH | | KFQGRVTMTRDTSISTAYMELSGLRSDDPAVYYCARDMNILATVPFDIWGQGTLVTVSS |
| CAR123-3 | 1137 | DIQLTQSPSSLSASVGDRVTITCRASQSISSYLNWYQQKPGKAPKLLIYAASSLQSGVPSRF |
| VL | | SGSGSGTDFTLTVNSLQPEDFATYYCQQGDSVPLTFGGGTKVEIK |
| CAR123-4 | 1138 | atggccctccctgtcaccgccctgctgcttccgctggctcttctgctccacgccgc |
| NT | | tcggccccaagtccaactccaacagtcaggcgcagaagtgaaaaagagcggtgcat |
| | | cggtgaaagtgtcatgcaaagcctcgggctacaccttcactgactactatatgcac |
| | | tggctgcggcaggcaccgggacagggacttgagtggatgggatggatcaacccgaa |
| | | ttcaggggacactaactacgcgcagaagttccaggggagagtgaccctgacgaggg |
| | | acacctcaatttcgaccgtctacatggaattgtcgcgcctgagatcggacgatact |
| | | gctgtgtactactgtgcccgcgacatgaacatcctcgcgactgtgccttttgatat |
| | | ctggggacaggggactatggtcaccgtttcctccgcttccggtggcggaggctcgg |
| | | gaggccgggcctccggtggaggaggcagcgacatccagatgactcagagcccttcc |
| | | tcgctgagcgcctcagtgggagatcgcgtgaccatcacttgccgggccagccagtc |
| | | catttcgtcctacctcaattggtaccagcagaagccgggaaaggcgcccaagctct |
| | | tgatctacgctgcgagctccctgcaaagcggggtgccgagccgattctcgggttcc |
| | | ggctcgggaaccgacttcactctgaccatctcatccctgcaaccagaggactttgc |
| | | cacctactactgccaacaaggagattctgtcccactgacgttcggcggaggaacca |
| | | aggtcgaaatcaagaccactaccccagcaccgaggccacccaccccggctcctacc |
| | | atcgcctcccagcctctgtccctgcgtccggaggcatgtagacccgcagctggtgg |
| | | ggccgtgcatacccggggtcttgacttcgcctgcgatatctacatttgggcccctc |
| | | tggctggtacttgcggggtcctgctgctttcactcgtgatcactctttactgtaag |
| | | cgcggtcggaagaagctgctgtacatctttaagcaacccttcatgaggcctgtgca |
| | | gactactcaagaggaggacggctgttcatgccggttcccagaggaggaggaaggcg |
| | | gctgcgaactgcgcgtgaaattcagccgcagcgcagatgctccagcctacaagcag |
| | | gggcagaaccagctctacaacgaactcaatcttggtcggagagaggagtacgacgt |
| | | gctggacaagcggagaggacgggacccagaaatgggcgggaagccgcgcagaaaga |
| | | atccccaagagggcctgtacaacgagctccaaaaggataagatggcagaagcctat |
| | | agcgagattggtatgaaaggggaacgcagaagaggcaaaggccacgacggactgta |
| | | ccagggactcagcaccgccaccaaggacacctatgacgctcttcacatgcaggccc |
| | | tgccgcctcgg |
| CAR123-4 | 1139 | MALPVTALLLPLALLLHAARPQVQLQQSGAEVKKSGASVKVSCKASGYTFTDYYMHWLRQAP |
| AA | | GQGLEWMGWINPNSGDTNYAQKFQGRVTLTRDTSISTVYMELSRLRSDDTAVYYCARDMNIL |
| | | ATVPFDIWGQGTMVTVSSASGGGGSGGRASGGGGSDIQMTQSPSSLSASVGDRVTITCRASQ |
| | | SISSYLNWYQQKPGKAPKLLIYAASSLQSGVPSRFSGSGSGTDFTLTISSLQPEDFATYYCQ |
| | | QGDSVPLTFGGGTKVEIKTTTPAPRPPTPAPTIASQPLSLRPEACRPAAGGAVHTRGLDFAC |
| | | DIYIWAPLAGTCGVLLLSLVITLYCK |
| CAR123-4 | 1140 | MALPVTALLLPLALLLHAARPQVQLQQSGAEVKKSGASVKVSCKASGYTFTDYYMHWLRQAP |
| scFv | | GQGLEWMGWINPNSGDTNYAQKFQGRVTLTRDTSISTVYMELSRLRSDDTAVYYCARDMNIL |
| | | ATVPFDIWGQGTMVTVSSASGGGGSGGRASGGGGSDIQMTQSPSSLSASVGDRVTITCRASQ |
| | | SISSYLNWYQQKPGKAPKLLIYAASSLQSGVPSRFSGSGSGTDFTLTISSLQPEDFATYYCQ |
| | | QGDSVPLTFGGGTKVEIK |
| CAR123-4 | 1141 | QVQLQQSGAEVKKSGASVKVSCKASGYTFTDYYMHWLRQAPGQGLEWMGWINPNSGDTNYAQ |
| VH | | KFQGRVTLTRDTSISTVYMELSRLRSDDTAVYYCARDMNILATVPFDIWGQGTMVTVSS |
| CAR123-4 | 1142 | DIQMTQSPSSLSASVGDRVTITCRASQSISSYLNWYQQKPGKAPKLLIYAASSLQSGVPSRF |
| VL | | SGSGSGTDFTLTISSLQPEDFATYYCQQGDSVPLTFGGGTKVEIK |

[1302] In some embodiments, the antigen binding domain comprises a HC CDR1, a HC CDR2, and a HC CDR3 of any heavy chain binding domain amino acid sequences listed in Table 16. In embodiments, the antigen binding domain further comprises a LC CDR1, a LC CDR2, and a LC CDR3. In embodiments, the antigen binding domain comprises a LC CDR1, a LC CDR2, and a LC CDR3 of any light chain binding domain amino acid sequences listed in Table 16.

[1303] In some embodiments, the antigen binding domain comprises one, two or all of LC CDR1, LC CDR2, and LC CDR3 of any light chain binding domain amino acid sequences listed in Table 16, and one, two or all of HC CDR1, HC CDR2, and HC CDR3 of any heavy chain binding domain amino acid sequences listed in Table 16.

[1304] In some embodiments, the CDRs are defined according to the Kabat numbering scheme, the Chothia numbering scheme, or a combination thereof.

[1305] The sequences of human CDR sequences of the scFv domains are shown in Table 17 for the heavy chain variable domains and in Table 18 for the light chain variable domains. “ID” stands for the respective SEQ ID NO for each CDR.

TABLE 17
Heavy Chain Variable Domain CDRs

| | | SEQ | | SEQ | | SEQ |
|---|---|---|---|---|---|---|
| | | ID | | ID | | ID |
| Candidate | HCDR1 | NO: | HCDR2 | NO: | HCDR3 | NO: |
| CAR123-1 | GYTFTDYYMH | 1006 | WINPNSGDTNYAQKFQG | 1010 | DMNILATVPFDI | 1014 |
| CAR123-2 | GYTFTGYYMH | 1007 | WINPNSGGTNYAQKFQG | 1011 | DMNILATVPFDI | 1015 |
| CAR123-3 | GYTFTGYYMH | 1008 | WINPNSGGTNYAQKFQG | 1012 | DMNILATVPFDI | 1016 |
| CAR123-4 | GYIFTGYYIH | 1009 | WINPNSGGTNYAQKFQG | 1013 | DMNILATVPFDI | 1017 |

TABLE 18
Light Chain Variable Domain CDRs

| | | SEQ ID | | SEQ ID | | SEQ ID |
|---|---|---|---|---|---|---|
| Candidate | LCDR1 | NO: | LCDR2 | NO: | LCDR3 | NO: |
| CAR123-1 | RASQSISSYLN | 1018 | AASSLQS | 1022 | QQGDSVPLT | 1026 |
| CAR123-2 | RASQSISTYLN | 1019 | AAFSLQS | 1023 | QQGDSVPLT | 1027 |
| CAR123-3 | RASQSISSYLN | 1020 | AASSLQS | 1024 | QQGDSVPLT | 1028 |
| CAR123-4 | RASQSISSYLN | 1021 | AASSLQS | 1025 | QQGDSVPLT | 1029 |

[1306] In an embodiment, the B-cell inhibitor comprises a CD123 CAR which comprises an antibody or antibody fragment which includes a CD123 binding domain, wherein said CD123 binding domain comprises one or more of light chain complementarity determining region 1 (LC CDR1), light chain complementarity determining region 2 (LC CDR2), and light chain complementarity determining region 3 (LC CDR3) amino acid sequence listed in Table 18, and one or more of heavy chain complementarity determining region 1 (HC CDR1), heavy chain complementarity determining region 2 (HC CDR2), and heavy chain complementarity determining region 3 (HC CDR3) of any CD123 heavy chain binding domain amino acid sequence listed in Table 17.

[1307] Additional CD123 CDR sequences of the scFv domains are shown in Tables 19, 21, and 23 for the heavy chain variable domains and in Tables 20, 22, and 24 for the light chain variable domains. “ID” stands for the respective SEQ ID NO for each CDR.

[1308] The CDRs provided in Tables 19 and 20 are according to a combination of the Kabat and Chothia numbering scheme.

TABLE 19
Heavy Chain Variable Domain CDRs

| | | SEQ | | SEQ | | SEQ |
|---|---|---|---|---|---|---|
| | | ID | | ID | | ID |
| Candidate | HCDR1 | NO: | HCDR2 | NO: | HCDR3 | NO: |
| CAR123-1 | GYTFTDYYMH | 1030 | WINPNSGDTNYAQKFQG | 1034 | DMNILATVPFDI | 1038 |
| CAR123-2 | GYTFTGYYMH | 1031 | WINPNSGGTNYAQKFQG | 1035 | DMNILATVPFDI | 1039 |
| CAR123-3 | GYIFTGYYIH | 1032 | WINPNSGGTNYAQKFQG | 1036 | DMNILATVPFDI | 1040 |
| CAR123-4 | GYTFTGYYMH | 1033 | WINPNSGGTNYAQKFQG | 1037 | DMNILATVPFDI | 1041 |

TABLE 20
Light Chain Variable Domain CDRs

| | | SEQ ID | | SEQ ID | | SEQ ID |
|---|---|---|---|---|---|---|
| Candidate | LCDR1 | NO: | LCDR2 | NO: | LCDR3 | NO: |
| CAR123-1 | RASQSISTYLN | 1042 | AASSLQS | 1046 | QQGDSVPLT | 1050 |
| CAR123-2 | RASQSISSYLN | 1043 | AAFSLQS | 1047 | QQGDSVPLT | 1051 |
| CAR123-3 | RASQSISSYLN | 1044 | AASSLQS | 1048 | QQGDSVPLT | 1052 |
| CAR123-4 | RASQSISSYLN | 1045 | AASSLQS | 1049 | QQGDSVPLT | 1053 |

[1309] In an embodiment, the B-cell inhibitor comprises a CD123 CAR which comprises an antibody or antibody fragment which includes a CD123 binding domain, wherein said CD123 binding domain comprises one or more of light chain complementarity determining region 1 (LC CDR1), light chain complementarity determining region 2 (LC CDR2), and light chain complementarity determining region 3 (LC CDR3) amino acid sequence listed in Table 20, and one or more of heavy chain complementarity determining region 1 (HC CDR1), heavy chain complementarity determining region 2 (HC CDR2), and heavy chain complementarity determining region 3 (HC CDR3) of any CD123 heavy chain binding domain amino acid sequence listed in Table 19.

TABLE 21
Heavy Chain Variable Domain CDRs according to the Kabat
numbering scheme (Kabat et al. (1991), “Sequences of
Proteins of Immunological Interest” 5th Ed. Public
Health Service, National Institutes of Health,
Bethesda, MD)

| | | SEQ | | SEQ | | SEQ |
|---|---|---|---|---|---|---|
| | | ID | | ID | | ID |
| Candidate | HCDR1 | NO: | HCDR2 | NO: | HCDR3 | NO: |
| CAR123-1 | GYYMH | 1054 | WINPNSGGTNYAQKFQG | 1058 | DMNILATVPFDI | 1062 |
| CAR123-2 | GYYMH | 1055 | WINPNSGGTNYAQKFQG | 1059 | DMNILATVPFDI | 1063 |
| CAR123-3 | GYYIH | 1056 | WINPNSGGTNYAQKFQG | 1060 | DMNILATVPFDI | 1064 |
| CAR123-4 | DYYMH | 1057 | WINPNSGDTNYAQKFQG | 1061 | DMNILATVPFDI | 1065 |

TABLE 22
Light Chain Variable Domain CDRs according to
the Kabat numbering scheme (Kabat et al. (1991),
“Sequences of Proteins of Immunological Interest”
5th Ed. Public Health Service, National
Institutes of Health, Bethesda, MD)

| | | SEQ ID | | SEQ ID | | SEQ ID |
|---|---|---|---|---|---|---|
| Candidate | LCDR1 | NO: | LCDR2 | NO: | LCDR3 | NO: |
| CAR123-1 | RASQSISTYLN | 1066 | AAFSLQS | 1070 | QQGDSVPLT | 1074 |
| CAR123-2 | RASQSISSYLN | 1067 | AASSLQS | 1071 | QQGDSVPLT | 1075 |
| CAR123-3 | RASQSISSYLN | 1068 | AASSLQS | 1072 | QQGDSVPLT | 1076 |
| CAR123-4 | RASQSISSYLN | 1069 | AASSLQS | 1073 | QQGDSVPLT | 1077 |

[1310] In an embodiment, the B-cell inhibitor comprises a CD123 CAR which comprises an antibody or antibody fragment which includes a CD123 binding domain, wherein said CD123 binding domain comprises one or more of light chain complementarity determining region 1 (LC CDR1), light chain complementarity determining region 2 (LC CDR2), and light chain complementarity determining region 3 (LC CDR3) amino acid sequence listed in Table 22, and one or more of heavy chain complementarity determining region 1 (HC CDR1), heavy chain complementarity determining region 2 (HC CDR2), and heavy chain complementarity determining region 3 (HC CDR3) of any CD123 heavy chain binding domain amino acid sequence listed in Table 21.

TABLE 23
Heavy Chain Variable Domain CDRs according to
the Chothia numbering scheme (Al-Lazikani et
al., (1997) JMB 273, 927-948)

| | | SEQ | | SEQ | | SEQ |
|---|---|---|---|---|---|---|
| Can- | | ID | | ID | | ID |
| didate | HCDR1 | NO: | HCDR2 | NO: | HCDR3 | NO: |
| CAR123-1 | GYTFTGY | 1078 | NPNSGG | 1082 | DMNILATVPFDI | 1086 |
| CAR123-2 | GYTFTGY | 1079 | NPNSGG | 1083 | DMNILATVPFDI | 1087 |
| CAR123-3 | GYIFTGY | 1080 | NPNSGG | 1084 | DMNILATVPFDI | 1088 |
| CAR123-4 | GYTFTDY | 1081 | NPNSGD | 1085 | DMNILATVPFDI | 1089 |

TABLE 24
Light Chain Variable Domain CDRs according
to the Chothia numbering scheme (Al-Lazikani
et al., (1997) JMB 273, 927-948)

| | | SEQ | | SEQ | | SEQ |
|---|---|---|---|---|---|---|
| | | ID | | ID | | ID |
| Candidate | LCDR1 | NO: | LCDR2 | NO: | LCDR3 | NO: |
| CAR123-1 | SQSISTY | 1090 | AAF | 1094 | GDSVPL | 1098 |
| CAR123-2 | SQSISSY | 1091 | AAS | 1095 | GDSVPL | 1099 |
| CAR123-3 | SQSISSY | 1092 | AAS | 1096 | GDSVPL | 1100 |
| CAR123-4 | SQSISSY | 1093 | AAS | 1097 | GDSVPL | 1101 |

[1311] In an embodiment, the B-cell inhibitor comprises a CD123 CAR which comprises an antibody or antibody fragment which includes a CD123 binding domain, wherein said CD123 binding domain comprises one or more of light chain complementarity determining region 1 (LC CDR1), light chain complementarity determining region 2 (LC CDR2), and light chain complementarity determining region 3 (LC CDR3) amino acid sequence listed in Table 24, and one or more of heavy chain complementarity determining region 1 (HC CDR1), heavy chain complementarity determining region 2 (HC CDR2), and heavy chain complementarity determining region 3 (HC CDR3) of any CD123 heavy chain binding domain amino acid sequence listed in Table 23.

[1312] Additional description of these CD123 CARs is provided, for instance, in PCT/CN2014/090508, which application incorporated by reference herein in its entirety.

[1313] Human anti-CD123 CAR constructs were evaluated for activity using a Jurkat cell line containing the luciferase reporter driven by the NFAT promoter (termed JNL cells). CD123 CAR activity was measured for four human CAR constructs described herein (CD123 CAR1-4) and murine CD123 CAR constructs 1172 and 1176. CAR activity was measured as activation of this NFAT-driven reporter. Lentiviral supernatants containing the CART constructs were added to JNL cells for transduction. 4-6 days after transduction, JNL cells were either evaluated for CAR expression by FACS as described below or mixed with target-positive (MOLM3, K562 cells engineered to express CD123 (CD123-K562)) or target-negative (K562) cell lines at an effector (JNL) to target cell line (E:T) ratio of 3:1 to trigger activation (FIG. 41). After 20 hours of co-incubation, luciferase signal was measured using the Bright-Glo™ Luciferase Assay on the EnVision instrument as shown in FIGS. 42A, 42B and 42C.

[1314] Optimal anti-CD123 CAR constructs were selected based on the quantity and quality of the effector T cell responses of CD123 CAR transduced T cells (“CART-CD123” or “CART-CD123 T cells”) in response to CD123 expressing (“CD123+”) targets. Effector T cell responses include, but are not limited to, cellular expansion, proliferation, doubling, cytokine production and target cell killing or cytolytic activity (degranulation).

[1315] Generation of CART-CD123

[1316] The human scFv encoding lentiviral transfer vectors were used to produce the genomic material packaged into the VSVg pseudotyped lentiviral particles. Lentiviral transfer vector DNA was mixed with the three packaging components of VSVg, gag/pol and rev in combination with lipofectamine reagent to transfect them together in to Lenti-X 293T cells (Clontech).

[1317] After 30 hours, the media was collected, filtered and stored at −80 C. The therapeutic CART-CD123 were generated by starting with the blood from a normal apheresed donor whose naïve T cells were obtained by negative selection for T cells, CD4+ and CD8+ lymphocytes. These cells were activated by CD3×28 beads (Dynabeads® Human T-Expander CD3/CD28, Invitrogen) at a ratio of 1:3 in RPMI 1640, 10% heat-inactivated fetal calf serum (FCS), 2 mM L-glutamine, 1× Penicillin/Streptomycin, 100 μM non-essential amino acids, 1 mM NaPyruvate, 10 mM Hepes, and 55 μM 2-mercaptoethanol at 37° C., 5% CO₂. T cells were cultured at 1×10⁶ T cells in 0.5 mL medium per well of a 24-well plate. After 24 hours, the T cells was blasting and 0.5 mL of viral supernatant was added. The T cells then began to divide in a logarithmic growth pattern, which was monitored by measuring the cell counts per mL, and T cells were diluted in fresh medium every two days. As the T cells began to rest down after approximately 10 days, the logarithmic growth waned. The combination of slowing growth rate and T cell size approaching ˜300 fl determined the state for T cells to be cryopreserved for later analysis.

[1318] Before cryopreserving, percentage of cells transduced (expressing the anti-CD123 CAR on the cell surface) and their relative fluorescence intensity of expression were determined by flow cytometric analysis on a BD LSRFortessa or BD-FACSCanto using Protein L as a detection reagent. Gating histogram plots of relative fluorescent intensity from that FACS for signal above unstained cells demonstrated the percentage of transduced T cells. Transduction resulted in a range of CART positive cells from 12-42% as shown in FIGS. 42A, 42B and 42C.

[1319] Evaluating Cytolytic Activity of CART-CD123 Redirected T Cells.

[1320] To evaluate the functional abilities of CART-CD123 T cells to kill target expressing cells, the cells were thawed and allowed to recover overnight.

[1321] T cell killing was directed towards CD123-expressing MOLM13 acute myelogenous leukemia cell lines stably expressing luciferase. Untransduced T cells were used to determine non-specific background killing levels. The cytolytic activities of CART-CD123 were measured as a titration of effector:target cell ratios of 4:1 and 2-fold downward dilutions of T cells where effectors were defined as T cells expressing the anti-CD123 chimeric receptor. Assays were initiated by mixing an appropriate number of T cells with a constant number of targets cells. After 20 hours luciferase signal was measured using the Bright-Glo™ Luciferase Assay on the EnVision instrument. As the proportion of CD123-CART-expressing cells to untransduced T cells was increased, killing of CD123 cells was similarly increased. The data presented herein suggest that those cells expressing CD123 are destroyed only by CD123-CART-expressing cells and not by untransduced T cells. FIGS. 43A and 43B.

[1322] T Cell Transduction

[1323] Human anti-human CD123 clones NVS 2 (expressing CAR123-2), NVS 3 (expressing CAR123-3), NVS 4 (expressing CAR123-4) were selected for further study. These clones were all cross-reactive against cynomolgus CD123. Their activity was compared against mouse clones 1172 and 1176, comprising the VH and VL domains in a light-to-heavy orientation with a CD8 hinge domain, CD8 transmembrane domain, and 41BB-costimulatory domain. 1176 is also cross-reactive against cynomolgus CD123. 1172 is not.

[1324] Plasmids were transformed into competent cells, grown in 500 cc broth, isolated by maxiprep, and transduced using standard methods into 293T cells. Lentiviral supernatant was collected at 24 and 48 hours, concentrated using ultracentrifugation, and frozen.

[1325] The lentivirus was titered on SupT1 cells and the appropriate amount of virus was determined for a transduction of primary T cells at a MOI of 3. Primary normal donor CD4+CD8 cells were stimulated using anti-CD3/CD28 beads (Dynal, Invitrogen) and interleukin-2 100 U/ml for 6 days, followed by debeading and were and frozen once. The T cell cellular volume decreased to <300 fL (after approximately 10-12 days).

[1326] T cell transduction efficiency was virtually 100% for all clones (FIGS. 44A and 44B). CD4:CD8 ratios were approximately 1:1 in the NVS clones, and 3:2 in the 1172 and 1176 clones (FIG. 45).

[1327] Degranulation

[1328] To assess degranulation, CART cells (NVS 2-4, 1172 and 1176 clones) were thawed, rested overnight at a concentration of 2e⁶ cells/ml in T cell media. Cells were then counted and resuspended at 1e⁶ cells/ml the following day. Tumor target cells (TCM, PMA/iono, MOLM14 or JURKAT) were resuspended at 5e⁶ cells/ml. Cells were plated at a ratio of 1e⁵ T cell:5e⁵ tumor cell in 48 well plates and incubated for 2 hours in the presence of anti-CD107a PECy7, anti-CD49d purified, and anti-CD28 purified antibodies. Cells were then harvested, stained with anti-CD3 APC and acquired using BD LSR Fortessa (FIGS. 46A, 46B and 46C).

[1329] T cell degranulation is indicated in the upper right quadrant of each plot of FIGS. 46A, 46B and 46C. The results presented herein demonstrate similar T cell recognition of CD123+ targets, manifested by similar degranulation during a 2-hr in vitro assay. C1176 had inferior degranulation of 65% compared with approximately 80% in the other clones.

[1330] Cytotoxicity

[1331] To assess cytotoxicity, CART cells (NVS 2-4, 1172 and 1176 clones) were thawed and rested overnight at 2e⁶ cells/ml in T cell media. Cells were counted and resuspended at 1e⁶ cells/ml the following day. Tumor target cells (MOLM14) were resuspended at 1e⁶ cells/ml. Cells were plated in a black, flat-bottom 96 well plate at decreasing E:T ratios as indicated (FIG. 47), in duplicate. After 20 hours of incubation, luciferin was added and the plate was imaged to determine photon flux as a measure of residual live cells. Killing of MOLM14 cells was equivalent between all clones at most effector:target ratios at 20 hours.

[1332] In Vivo Mouse Model

[1333] NSG mice were injected iv with 1e⁶ luciferase expressing MOLM14 cells on DO. On D6 mice were imaged (IVIS Spectrum) for tumor burden and randomized into treatment groups. Mice with the lowest tumor burden were assigned to the control group (untransduced T cells, UTD). CART cells (NVS 2-4, 1172 and 1176 clones) or control T cells (1e⁶) were injected i.v. on D7. Data from imaging on performed D13 is shown in FIG. 48. Six days after injection, all anti-CD123 constructs provided equal anti-tumor effect, consistent with in vitro data.

[1334] Humanized anti-CD123 single chain variable fragments (scFv) based on murine 1176 which is cross-reactive against cynomolgus CD123 are generated and cloned into a lentiviral expression vector with the intracellular CD3zeta chain and the intracellular co-stimulatory domain of 4-1BB.

[1335] The order in which the VL and VH domains appear in the scFv was varied (i.e., VL-VH, or VH-VL orientation), and where either three or four copies of the “G4S” (SEQ ID NO:18) subunit, in which each subunit comprises the sequence GGGGS (SEQ ID NO:18) (e.g., (G4S)₃ (SEQ ID NO:107) or (G4S)₄ (SEQ ID NO:106)), connect the variable domains to create the entirety of the scFv domain, as shown in Table 25.

[1336] The sequences of the humanized CARs are provided below in Table 25.

[1337] These clones all contained a Q/K residue change in the signal domain of the co-stimulatory domain derived from CD3zeta chain.

TABLE 25
Humanized CD123 CAR Constructs

| | SEQ | |
|---|---|---|
| Name | ID | Sequence |
| hzCAR123-1 | 1143 | ATGGCCCTCCCTGTCACCGCCCTGCTGCTTCCGCTGGCTCTTCTGCTCCACGCCGC |
| NT | | TCGGCCCCAAGTGCAGCTGGTCCAGTCGGGAGCCGAAGTCAAGAAGCCCGGCGCTA |
| | | GCGTGAAAGTGTCCTGCAAAGCCTCCGGGTACACATTCACCTCCTACTGGATGAAT |
| | | TGGGTCAGACAGGCGCCCGGCCAGGGACTCGAGTGGATGGGAAGGATTGATCCTTA |
| | | CGACTCCGAAACCCATTACAACCAGAAGTTCAAGGACCGCGTGACCATGACTGTGG |
| | | ATAAGTCCACTTCCACCGCTTACATGGAGCTGTCCAGCCTGCGCTCCGAGGATACC |
| | | GCAGTGTACTACTGCGCCCGGGGAAACTGGGACGACTATTGGGGACAGGGAACTAC |
| | | CGTGACCGTGTCAAGCGGGGGTGGCGGTAGCGGAGGAGGGGGCTCCGGCGGCGGCG |
| | | GCTCAGGGGGCGGAGGAAGCGACGTGCAGCTCACCCAGTCGCCCTCATTTCTGTCG |
| | | GCCTCAGTGGGAGACAGAGTGACCATTACTTGTCGGGCCTCCAAGAGCATCTCCAA |
| | | GGACCTGGCCTGGTATCAGCAGAAGCCAGGAAAGGCGCCTAAGTTGCTCATCTACT |
| | | CGGGGTCGACCCTGCAATCTGGCGTGCCGTCCCGGTTCTCCGGTTCGGGAAGCGGT |
| | | ACCGAATTCACCCTTACTATCTCCTCCCTGCAACCGGAGGACTTCGCCACCTACTA |
| | | CTGCCAACAGCACAACAAGTACCCGTACACTTTCGGGGGTGGCACGAAGGTCGAAA |
| | | TCAAGACCACTACCCCAGCACCGAGGCCACCCACCCCGGCTCCTACCATCGCCTCC |
| | | CAGCCTCTGTCCCTGCGTCCGGAggcatgtagacccgcagctggtggggccgtgca |
| | | tacccggggtcttgacttcgcctgcgatatctacatttgggcccctctggctggta |
| | | cttgcggggtcctgctgctttcactcgtgatcactctttactgtaagcgcggtcgg |
| | | aagaagctgctgtacatctttaagcaacccttcatgaggcctgtgcagactactca |
| | | agaggaggacggctgttcatgccggttcccagaggaggaggaaggcggctgcgaac |
| | | tgcgcgtgaaattcagccgcagcgcagatgctccagcctacaagcaggggcagaac |
| | | cagctctacaacgaactcaatcttggtcggagagaggagtacgacgtgctggacaa |
| | | gcggagaggacgggacccagaaatgggcgggaagccgcgcagaaagaatccccaag |
| | | agggcctgtacaacgagctccaaaaggataagatggcagaagcctatagcgagatt |
| | | ggtatgaaaggggaacgcagaagaggcaaaggccacgacggactgtaccagggact |
| | | cagcaccgccaccaaggacacctatgacgctcttcacatgcaggccctgccgcctc |
| | | gg |
| hzCAR123-1 | 1144 | MALPVTALLLPLALLLHAARPQVQLVQSGAEVKKPGASVKVSCKASGYTFTSYWMN |
| AA | | WVRQAPGQGLEWMGRIDPYDSETHYNQKFKDRVTMTVDKSTSTAYMELSSLRSEDT |
| | | AVYYCARGNWDDYWGQGTTVTVSSGGGGSGGGGSGGGGSGGGGSDVQLTQSPSFLS |
| | | ASVGDRVTITCRASKSISKDLAWYQQKPGKAPKLLIYSGSTLQSGVPSRFSGSGSG |
| | | TEFTLTISSLQPEDFATYYCQQHNKYPYTFGGGTKVEIKTTTPAPRPPTPAPTIAS |
| | | QPLSLRPEACRPAAGGAVHTRGLDFACDIYIWAPLAGTCGVLLLSLVITLYCKRGR |
| | | KKLLYIFKQPFMRPVQTTQEEDGCSCRFPEEEEGGCELRVKFSRSADAPAYKQGQN |
| | | QLYNELNLGRREEYDVLDKRRGRDPEMGGKPRRKNPQEGLYNELQKDKMAEAYSEI |
| | | GMKGERRRGKGHDGLYQGLSTATKDTYDALHMQALPPR |
| hzCAR123-1 | 1145 | MALPVTALLLPLALLLHAARPQVQLVQSGAEVKKPGASVKVSCKASGYTFTSYWMNWVRQAP |
| scFv | | GQGLEWMGRIDPYDSETHYNQKFKDRVTMTVDKSTSTAYMELSSLRSEDTAVYYCARGNWDD |
| | | YWGQGTTVTVSSGGGGSGGGGSGGGGSGGGGSDVQLTQSPSFLSASVGDRVTITCRASKSIS |
| | | KDLAWYQQKPGKAPKLLIYSGSTLQSGVPSRFSGSGSGTEFTLTISSLQPEDFATYYCQQHN |
| | | KYPYTFGGGTKVEIK |
| hzCAR123-1 | 1146 | QVQLVQSGAEVKKPGASVKVSCKASGYTFTSYWMNWVRQAPGQGLEWMGRIDPYDSETHYNQ |
| VH | | KFKDRVTMTVDKSTSTAYMELSSLRSEDTAVYYCARGNWDDYWGQGTTVTVSS |
| hzCAR123-1 | 1147 | DVQLTQSPSFLSASVGDRVTITCRASKSISKDLAWYQQKPGKAPKLLIYSGSTLQSGVPSRF |
| VL | | SGSGSGTEFTLTISSLQPEDFATYYCQQHNKYPYTFGGGTKVEIK |
| hzCAR123-2 | 1148 | ATGGCCCTCCCTGTCACCGCCCTGCTGCTTCCGCTGGCTCTTCTGCTCCACGCCGC |
| NT | | TCGGCCCCAAGTGCAGCTGGTCCAGTCGGGAGCCGAAGTCAAGAAGCCCGGCGCTA |
| | | GCGTGAAAGTGTCCTGCAAAGCCTCCGGGTACACATTCACCTCCTACTGGATGAAT |
| | | TGGGTCAGACAGGCGCCCGGCCAGGGACTCGAGTGGATGGGAAGGATTGATCCTTA |
| | | CGACTCCGAAACCCATTACAACCAGAAGTTCAAGGACCGCGTGACCATGACTGTGG |
| | | ATAAGTCCACTTCCACCGCTTACATGGAGCTGTCCAGCCTGCGCTCCGAGGATACC |
| | | GCAGTGTACTACTGCGCCCGGGGAAACTGGGACGACTATTGGGGACAGGGAACTAC |
| | | CGTGACCGTGTCAAGCGGGGGTGGCGGTAGCGGAGGAGGGGGCTCCGGCGGCGGCG |
| | | GCTCAGGGGGCGGAGGAAGCGAAGTGGTGCTGACCCAGTCGCCCGCAACCCTCTCT |
| | | CTGTCGCCGGGAGAACGCGCCACTCTTTCCTGTCGGGCGTCCAAGAGCATCTCAAA |
| | | GGACCTCGCCTGGTACCAGCAGAAGCCTGGTCAAGCCCCGCGGCTGCTGATCTACT |
| | | CCGGCTCCACGCTGCAATCAGGAATCCCAGCCAGATTTTCCGGTTCGGGGTCGGGG |
| | | ACTGACTTCACCTTGACCATTAGCTCGCTGGAACCTGAGGACTTCGCCGTGTATTA |
| | | CTGCCAGCAGCACAACAAGTACCCGTACACCTTCGGAGGCGGTACTAAGGTCGAGA |
| | | TCAAGACCACTACCCCAGCACCGAGGCCACCCACCCCGGCTCCTACCATCGCCTCC |
| | | CAGCCTCTGTCCCTGCGTCCGGAggcatgtagacccgcagctggtggggccgtgca |
| | | tacccggggtcttgacttcgcctgcgatatctacatttgggcccctctggctggta |
| | | cttgcggggtcctgctgctttcactcgtgatcactctttactgtaagcgcggtcgg |
| | | aagaagctgctgtacatctttaagcaacccttcatgaggcctgtgcagactactca |
| | | agaggaggacggctgttcatgccggttcccagaggaggaggaaggcggctgcgaac |
| | | tgcgcgtgaaattcagccgcagcgcagatgctccagcctacaagcaggggcagaac |
| | | cagctctacaacgaactcaatcttggtcggagagaggagtacgacgtgctggacaa |
| | | gcggagaggacgggacccagaaatgggcgggaagccgcgcagaaagaatccccaag |
| | | agggcctgtacaacgagctccaaaaggataagatggcagaagcctatagcgagatt |
| | | ggtatgaaaggggaacgcagaagaggcaaaggccacgacggactgtaccagggact |
| | | cagcaccgccaccaaggacacctatgacgctcttcacatgcaggccctgccgcctc |
| | | gg |
| hzCAR123-2 | 1149 | MALPVTALLLPLALLLHAARPQVQLVQSGAEVKKPGASVKVSCKASGYTFTSYWMNWVRQ |
| AA | | APGQGLEWMGRIDPYDSETHYNQKFKDRVTMTVDKSTSTAYMELSSLRSEDTAVYYCARG |
| | | NWDDYWGQGTTVTVSSGGGGSGGGGSGGGGSGGGGSEVVLTQSPATLSLSPGERATLSCR |
| | | ASKSISKDLAWYQQKPGQAPRLLIYSGSTLQSGIPARFSGSGSGTDFTLTISSLEPEDFA |
| | | VYYCQQHNKYPYTFGGGTKVEIKTTTPAPRPPTPAPTIASQPLSLRPEACRPAAGGAVHT |
| | | RGLDFACDIYIWAPLAGTCGVLLLSLVITLYCKRGRKKLLYIFKQPFMRPVQTTQEEDGC |
| | | SCRFPEEEEGGCELRVKFSRSADAPAYKQGQNQLYNELNLGRREEYDVLDKRRGRDPEMG |
| | | GKPRRKNPQEGLYNELQKDKMAEAYSEIGMKGERRRGKGHDGLYQGLSTATKDTYDALHM |
| | | QALPPR |
| hzCAR123-2 | 1150 | MALPVTALLLPLALLLHAARPQVQLVQSGAEVKKPGASVKVSCKASGYTFTSYWMNWVRQ |
| scFv | | APGQGLEWMGRIDPYDSETHYNQKFKDRVTMTVDKSTSTAYMELSSLRSEDTAVYYCARG |
| | | NWDDYWGQGTTVTVSSGGGGSGGGGSGGGGSGGGGSEVVLTQSPATLSLSPGERATLSCR |
| | | ASKSISKDLAWYQQKPGQAPRLLIYSGSTLQSGIPARFSGSGSGTDFTLTISSLEPEDFA |
| | | VYYCQQHNKYPYTFGGGTKVEIK |
| hzCAR123-2 | 1151 | QVQLVQSGAEVKKPGASVKVSCKASGYTFTSYWMNWVRQAPGQGLEWMGRIDPYDSETHYNQ |
| VH | | KFKDRVTMTVDKSTSTAYMELSSLRSEDTAVYYCARGNWDDYWGQGTTVTVSS |
| hzCAR123-2 | 1152 | EVVLTQSPATLSLSPGERATLSCRASKSISKDLAWYQQKPGQAPRLLIYSGSTLQSGIPARF |
| VL | | SGSGSGTDFTLTISSLEPEDFAVYYCQQHNKYPYTFGGGTKVEIK |
| hzCAR123-3 | 1153 | ATGGCCCTCCCTGTCACCGCCCTGCTGCTTCCGCTGGCTCTTCTGCTCCACGCCGCTCGGCC |
| NT | | CCAAGTGCAGCTGGTCCAGTCGGGAGCCGAAGTCAAGAAGCCCGGCGCTAGCGTGAAAGTGT |
| | | CCTGCAAAGCCTCCGGGTACACATTCACCTCCTACTGGATGAATTGGGTCAGACAGGCGCCC |
| | | GGCCAGGGACTCGAGTGGATGGGAAGGATTGATCCTTACGACTCCGAAACCCATTACAACCA |
| | | GAAGTTCAAGGACCGCGTGACCATGACTGTGGATAAGTCCACTTCCACCGCTTACATGGAGC |
| | | TGTCCAGCCTGCGCTCCGAGGATACCGCAGTGTACTACTGCGCCCGGGGAAACTGGGACGAC |
| | | TATTGGGGACAGGGAACTACCGTGACCGTGTCAAGCGGGGGTGGCGGTAGCGGAGGAGGGGG |
| | | CTCCGGCGGCGGCGGCTCAGGGGGCGGAGGAAGCGACGTCGTGATGACCCAGTCACCGGCAT |
| | | TCCTGTCCGTGACTCCCGGAGAAAAGGTCACGATTACTTGCCGGGCGTCCAAGAGCATCTCC |
| | | AAGGACCTCGCCTGGTACCAACAGAAGCCGGACCAGGCCCCTAAGCTGTTGATCTACTCGGG |
| | | GTCCACCCTTCAATCGGGAGTGCCATCGCGGTTTAGCGGTTCGGGTTCTGGGACCGACTTCA |
| | | CTTTCACCATCTCCTCACTGGAAGCCGAGGATGCCGCCACTTACTACTGTCAGCAGCACAAC |
| | | AAGTATCCGTACACCTTCGGAGGCGGTACCAAAGTGGAGATCAAGACCACTACCCCAGCACC |
| | | GAGGCCACCCACCCCGGCTCCTACCATCGCCTCCCAGCCTCTGTCCCTGCGTCCGGAggcat |
| | | gtagacccgcagctggtggggccgtgcatacccggggtcttgacttcgcctgcgatatctac |
| | | atttgggcccctctggctggtacttgcggggtcctgctgctttcactcgtgatcactcttta |
| | | ctgtaagcgcggtcggaagaagctgctgtacatctttaagcaacccttcatgaggcctgtgc |
| | | agactactcaagaggaggacggctgttcatgccggttcccagaggaggaggaaggcggctgc |
| | | gaactgcgcgtgaaattcagccgcagcgcagatgctccagcctacaagcaggggcagaacca |
| | | gctctacaacgaactcaatcttggtcggagagaggagtacgacgtgctggacaagcggagag |
| | | gacgggacccagaaatgggcgggaagccgcgcagaaagaatccccaagagggcctgtacaac |
| | | gagctccaaaaggataagatggcagaagcctatagcgagattggtatgaaaggggaacgcag |
| | | aagaggcaaaggccacgacggactgtaccagggactcagcaccgccaccaaggacacctatg |
| | | acgctcttcacatgcaggccctgccgcctcgg |
| hzCAR123-3 | 1154 | MALPVTALLLPLALLLHAARPQVQLVQSGAEVKKPGASVKVSCKASGYTFTSYWMNWVRQ |
| AA | | APGQGLEWMGRIDPYDSETHYNQKFKDRVTMTVDKSTSTAYMELSSLRSEDTAVYYCARG |
| | | NWDDYWGQGTTVTVSSGGGGSGGGGSGGGGSGGGGSDVVMTQSPAFLSVTPGEKVTITCR |
| | | ASKSISKDLAWYQQKPDQAPKLLIYSGSTLQSGVPSRFSGSGSGTDFTFTISSLEAEDAA |
| | | TYYCQQHNKYPYTFGGGTKVEIKTTTPAPRPPTPAPTIASQPLSLRPEACRPAAGGAVHT |
| | | RGLDFACDIYIWAPLAGTCGVLLLSLVITLYCKRGRKKLLYIFKQPFMRPVQTTQEEDGC |
| | | SCRFPEEEEGGCELRVKFSRSADAPAYKQGQNQLYNELNLGRREEYDVLDKRRGRDPEMG |
| | | GKPRRKNPQEGLYNELQKDKMAEAYSEIGMKGERRRGKGHDGLYQGLSTATKDTYDALHM |
| | | QALPPR |
| hzCAR123-3 | 1155 | MALPVTALLLPLALLLHAARPQVQLVQSGAEVKKPGASVKVSCKASGYTFTSYWMNWVRQ |
| scFv | | APGQGLEWMGRIDPYDSETHYNQKFKDRVTMTVDKSTSTAYMELSSLRSEDTAVYYCARG |
| | | NWDDYWGQGTTVTVSSGGGGSGGGGSGGGGSGGGGSDVVMTQSPAFLSVTPGEKVTITCR |
| | | ASKSISKDLAWYQQKPDQAPKLLIYSGSTLQSGVPSRFSGSGSGTDFTFTISSLEAEDAA |
| | | TYYCQQHNKYPYTFGGGTKVEIK |
| hzCAR123-3 | 1156 | QVQLVQSGAEVKKPGASVKVSCKASGYTFTSYWMNWVRQAPGQGLEWMGRIDPYDSETHYNQ |
| VH | | KFKDRVTMTVDKSTSTAYMELSSLRSEDTAVYYCARGNWDDYWGQGTTVTVSS |
| hzCAR123-3 | 1157 | DVVMTQSPAFLSVTPGEKVTITCRASKSISKDLAWYQQKPDQAPKLLIYSGSTLQSGVPSRF |
| VL | | SGSGSGTDFTFTISSLEAEDAATYYCQQHNKYPYTFGGGTKVEIK |
| hzCAR123-4 | 1158 | ATGGCCCTCCCTGTCACCGCCCTGCTGCTTCCGCTGGCTCTTCTGCTCCACGCCGCTCGGCC |
| NT | | CCAAGTGCAGCTGGTCCAGTCGGGAGCCGAAGTCAAGAAGCCCGGCGCTAGCGTGAAAGTGT |
| | | CCTGCAAAGCCTCCGGGTACACATTCACCTCCTACTGGATGAATTGGGTCAGACAGGCGCCC |
| | | GGCCAGGGACTCGAGTGGATGGGAAGGATTGATCCTTACGACTCCGAAACCCATTACAACCA |
| | | GAAGTTCAAGGACCGCGTGACCATGACTGTGGATAAGTCCACTTCCACCGCTTACATGGAGC |
| | | TGTCCAGCCTGCGCTCCGAGGATACCGCAGTGTACTACTGCGCCCGGGGAAACTGGGACGAC |
| | | TATTGGGGACAGGGAACTACCGTGACCGTGTCAAGCGGGGGTGGCGGTAGCGGAGGAGGGGG |
| | | CTCCGGCGGCGGCGGCTCAGGGGGCGGAGGAAGCGACGTGGTCATGACTCAGTCCCCGGACT |
| | | CACTCGCGGTGTCGCTTGGAGAGAGAGCGACCATCAACTGTCGGGCCTCAAAGAGCATCAGC |
| | | AAGGACCTGGCCTGGTACCAGCAGAAGCCGGGACAGCCGCCAAAGCTGCTGATCTACTCCGG |
| | | GTCCACCTTGCAATCTGGTGTCCCTGACCGGTTCTCCGGTTCCGGGTCGGGTACCGACTTCA |
| | | CGCTCACTATTTCGTCGCTGCAAGCCGAAGATGTGGCCGTGTACTATTGCCAACAGCACAAC |
| | | AAGTACCCCTACACTTTTGGCGGAGGCACCAAGGTGGAAATCAAGACCACTACCCCAGCACC |
| | | GAGGCCACCCACCCCGGCTCCTACCATCGCCTCCCAGCCTCTGTCCCTGCGTCCGGAggcat |
| | | gtagacccgcagctggtggggccgtgcatacccggggtcttgacttcgcctgcgatatctac |
| | | atttgggcccctctggctggtacttgcggggtcctgctgctttcactcgtgatcactcttta |
| | | ctgtaagcgcggtcggaagaagctgctgtacatctttaagcaacccttcatgaggcctgtgc |
| | | agactactcaagaggaggacggctgttcatgccggttcccagaggaggaggaaggcggctgc |
| | | gaactgcgcgtgaaattcagccgcagcgcagatgctccagcctacaagcaggggcagaacca |
| | | gctctacaacgaactcaatcttggtcggagagaggagtacgacgtgctggacaagcggagag |
| | | gacgggacccagaaatgggcgggaagccgcgcagaaagaatccccaagagggcctgtacaac |
| | | gagctccaaaaggataagatggcagaagcctatagcgagattggtatgaaaggggaacgcag |
| | | aagaggcaaaggccacgacggactgtaccagggactcagcaccgccaccaaggacacctatg |
| | | acgctcttcacatgcaggccctgccgcctcgg |
| hzCAR123-4 | 1159 | MALPVTALLLPLALLLHAARPQVQLVQSGAEVKKPGASVKVSCKASGYTFTSYWMNWVRQ |
| AA | | APGQGLEWMGRIDPYDSETHYNQKFKDRVTMTVDKSTSTAYMELSSLRSEDTAVYYCARG |
| | | NWDDYWGQGTTVTVSSGGGGSGGGGSGGGGSGGGGSDVVMTQSPDSLAVSLGERATINCR |
| | | ASKSISKDLAWYQQKPGQPPKLLIYSGSTLQSGVPDRFSGSGSGTDFTLTISSLQAEDVA |
| | | VYYCQQHNKYPYTFGGGTKVEIKTTTPAPRPPTPAPTIASQPLSLRPEACRPAAGGAVHT |
| | | RGLDFACDIYIWAPLAGTCGVLLLSLVITLYCKRGRKKLLYIFKQPFMRPVQTTQEEDGC |
| | | SCRFPEEEEGGCELRVKFSRSADAPAYKQGQNQLYNELNLGRREEYDVLDKRRGRDPEMG |
| | | GKPRRKNPQEGLYNELQKDKMAEAYSEIGMKGERRRGKGHDGLYQGLSTATKDTYDALHM |
| | | QALPPR |
| hzCAR123-4 | 1160 | MALPVTALLLPLALLLHAARPQVQLVQSGAEVKKPGASVKVSCKASGYTFTSYWMNWVRQ |
| scFv | | APGQGLEWMGRIDPYDSETHYNQKFKDRVTMTVDKSTSTAYMELSSLRSEDTAVYYCARG |
| | | NWDDYWGQGTTVTVSSGGGGSGGGGSGGGGSGGGGSDVVMTQSPDSLAVSLGERATINCR |
| | | ASKSISKDLAWYQQKPGQPPKLLIYSGSTLQSGVPDRFSGSGSGTDFTLTISSLQAEDVA |
| | | VYYCQQHNKYPYTFGGGTKVEIK |
| hzCAR123-4 | 1161 | QVQLVQSGAEVKKPGASVKVSCKASGYTFTSYWMNWVRQAPGQGLEWMGRIDPYDSETHYNQ |
| VH | | KFKDRVTMTVDKSTSTAYMELSSLRSEDTAVYYCARGNWDDYWGQGTTVTVSS |
| hzCAR123-4 | 1162 | DVVMTQSPDSLAVSLGERATINCRASKSISKDLAWYQQKPGQPPKLLIYSGSTLQSGVPDRF |
| VL | | SGSGSGTDFTLTISSLQAEDVAVYYCQQHNKYPYTFGGGTKVEIK |
| hzCAR123-5 | 1163 | ATGGCCCTCCCTGTCACCGCCCTGCTGCTTCCGCTGGCTCTTCTGCTCCACGCCGCTCGGCC |
| NT | | CGACGTGCAGCTCACCCAGTCGCCCTCATTTCTGTCGGCCTCAGTGGGAGACAGAGTGACCA |
| | | TTACTTGTCGGGCCTCCAAGAGCATCTCCAAGGACCTGGCCTGGTATCAGCAGAAGCCAGGA |
| | | AAGGCGCCTAAGTTGCTCATCTACTCGGGGTCGACCCTGCAATCTGGCGTGCCGTCCCGGTT |
| | | CTCCGGTTCGGGAAGCGGTACCGAATTCACCCTTACTATCTCCTCCCTGCAACCGGAGGACT |
| | | TCGCCACCTACTACTGCCAACAGCACAACAAGTACCCGTACACTTTCGGGGGTGGCACGAAG |
| | | GTCGAAATCAAGGGGGGTGGCGGTAGCGGAGGAGGGGGCTCCGGCGGCGGCGGCTCAGGGGG |
| | | CGGAGGAAGCCAAGTGCAGCTGGTCCAGTCGGGAGCCGAAGTCAAGAAGCCCGGCGCTAGCG |
| | | TGAAAGTGTCCTGCAAAGCCTCCGGGTACACATTCACCTCCTACTGGATGAATTGGGTCAGA |
| | | CAGGCGCCCGGCCAGGGACTCGAGTGGATGGGAAGGATTGATCCTTACGACTCCGAAACCCA |
| | | TTACAACCAGAAGTTCAAGGACCGCGTGACCATGACTGTGGATAAGTCCACTTCCACCGCTT |
| | | ACATGGAGCTGTCCAGCCTGCGCTCCGAGGATACCGCAGTGTACTACTGCGCCCGGGGAAAC |
| | | TGGGACGACTATTGGGGACAGGGAACTACCGTGACCGTGTCAAGCACCACTACCCCAGCACC |
| | | GAGGCCACCCACCCCGGCTCCTACCATCGCCTCCCAGCCTCTGTCCCTGCGTCCGGAggcat |
| | | gtagacccgcagctggtggggccgtgcatacccggggtcttgacttcgcctgcgatatctac |
| | | atttgggcccctctggctggtacttgcggggtcctgctgctttcactcgtgatcactcttta |
| | | ctgtaagcgcggtcggaagaagctgctgtacatctttaagcaacccttcatgaggcctgtgc |
| | | agactactcaagaggaggacggctgttcatgccggttcccagaggaggaggaaggcggctgc |
| | | gaactgcgcgtgaaattcagccgcagcgcagatgctccagcctacaagcaggggcagaacca |
| | | gctctacaacgaactcaatcttggtcggagagaggagtacgacgtgctggacaagcggagag |
| | | gacgggacccagaaatgggcgggaagccgcgcagaaagaatccccaagagggcctgtacaac |
| | | gagctccaaaaggataagatggcagaagcctatagcgagattggtatgaaaggggaacgcag |
| | | aagaggcaaaggccacgacggactgtaccagggactcagcaccgccaccaaggacacctatg |
| | | acgctcttcacatgcaggccctgccgcctcgg |
| hzCAR123-5 | 1164 | MALPVTALLLPLALLLHAARPDVQLTQSPSFLSASVGDRVTITCRASKSISKDLAWYQQK |
| AA | | PGKAPKLLIYSGSTLQSGVPSRFSGSGSGTEFTLTISSLQPEDFATYYCQQHNKYPYTFG |
| | | GGTKVEIKGGGGSGGGGSGGGGSGGGGSQVQLVQSGAEVKKPGASVKVSCKASGYTFTSY |
| | | WMNWVRQAPGQGLEWMGRIDPYDSETHYNQKFKDRVTMTVDKSTSTAYMELSSLRSEDTA |
| | | VYYCARGNWDDYWGQGTTVTVSSTTTPAPRPPTPAPTIASQPLSLRPEACRPAAGGAVHT |
| | | RGLDFACDIYIWAPLAGTCGVLLLSLVITLYCKRGRKKLLYIFKQPFMRPVQTTQEEDGC |
| | | SCRFPEEEEGGCELRVKFSRSADAPAYKQGQNQLYNELNLGRREEYDVLDKRRGRDPEMG |
| | | GKPRRKNPQEGLYNELQKDKMAEAYSEIGMKGERRRGKGHDGLYQGLSTATKDTYDALHM |
| | | QALPPR |
| hzCAR123-5 | 1165 | MALPVTALLLPLALLLHAARPDVQLTQSPSFLSASVGDRVTITCRASKSISKDLAWYQQK |
| scFv | | PGKAPKLLIYSGSTLQSGVPSRFSGSGSGTEFTLTISSLQPEDFATYYCQQHNKYPYTFG |
| | | GGTKVEIKGGGGSGGGGSGGGGSGGGGSQVQLVQSGAEVKKPGASVKVSCKASGYTFTSY |
| | | WMNWVRQAPGQGLEWMGRIDPYDSETHYNQKFKDRVTMTVDKSTSTAYMELSSLRSEDTA |
| | | VYYCARGNWDDYWGQGTTVTVSS |
| hzCAR123-5 | 1166 | QVQLVQSGAEVKKPGASVKVSCKASGYTFTSYWMNWVRQAPGQGLEWMGRIDPYDSETHYNQ |
| VH | | KFKDRVTMTVDKSTSTAYMELSSLRSEDTAVYYCARGNWDDYWGQGTTVTVSS |
| hzCAR123-5 | 1167 | DVQLTQSPSFLSASVGDRVTITCRASKSISKDLAWYQQKPGKAPKLLIYSGSTLQSGVPSRF |
| VL | | SGSGSGTEFTLTISSLQPEDFATYYCQQHNKYPYTFGGGTKVEIK |
| hzCAR123-6 | 1168 | ATGGCCCTCCCTGTCACCGCCCTGCTGCTTCCGCTGGCTCTTCTGCTCCACGCCGCTCGGCC |
| NT | | CGAAGTGGTGCTGACCCAGTCGCCCGCAACCCTCTCTCTGTCGCCGGGAGAACGCGCCACTC |
| | | TTTCCTGTCGGGCGTCCAAGAGCATCTCAAAGGACCTCGCCTGGTACCAGCAGAAGCCTGGT |
| | | CAAGCCCCGCGGCTGCTGATCTACTCCGGCTCCACGCTGCAATCAGGAATCCCAGCCAGATT |
| | | TTCCGGTTCGGGGTCGGGGACTGACTTCACCTTGACCATTAGCTCGCTGGAACCTGAGGACT |
| | | TCGCCGTGTATTACTGCCAGCAGCACAACAAGTACCCGTACACCTTCGGAGGCGGTACTAAG |
| | | GTCGAGATCAAGGGGGGTGGCGGTAGCGGAGGAGGGGGCTCCGGCGGCGGCGGCTCAGGGGG |
| | | CGGAGGAAGCCAAGTGCAGCTGGTCCAGTCGGGAGCCGAAGTCAAGAAGCCCGGCGCTAGCG |
| | | TGAAAGTGTCCTGCAAAGCCTCCGGGTACACATTCACCTCCTACTGGATGAATTGGGTCAGA |
| | | CAGGCGCCCGGCCAGGGACTCGAGTGGATGGGAAGGATTGATCCTTACGACTCCGAAACCCA |
| | | TTACAACCAGAAGTTCAAGGACCGCGTGACCATGACTGTGGATAAGTCCACTTCCACCGCTT |
| | | ACATGGAGCTGTCCAGCCTGCGCTCCGAGGATACCGCAGTGTACTACTGCGCCCGGGGAAAC |
| | | TGGGACGACTATTGGGGACAGGGAACTACCGTGACCGTGTCAAGCACCACTACCCCAGCACC |
| | | GAGGCCACCCACCCCGGCTCCTACCATCGCCTCCCAGCCTCTGTCCCTGCGTCCGGAggcat |
| | | gtagacccgcagctggtggggccgtgcatacccggggtcttgacttcgcctgcgatatctac |
| | | atttgggcccctctggctggtacttgcggggtcctgctgctttcactcgtgatcactcttta |
| | | ctgtaagcgcggtcggaagaagctgctgtacatctttaagcaacccttcatgaggcctgtgc |
| | | agactactcaagaggaggacggctgttcatgccggttcccagaggaggaggaaggcggctgc |
| | | gaactgcgcgtgaaattcagccgcagcgcagatgctccagcctacaagcaggggcagaacca |
| | | gctctacaacgaactcaatcttggtcggagagaggagtacgacgtgctggacaagcggagag |
| | | gacgggacccagaaatgggcgggaagccgcgcagaaagaatccccaagagggcctgtacaac |
| | | gagctccaaaaggataagatggcagaagcctatagcgagattggtatgaaaggggaacgcag |
| | | aagaggcaaaggccacgacggactgtaccagggactcagcaccgccaccaaggacacctatg |
| | | acgctcttcacatgcaggccctgccgcctcgg |
| hzCAR123-6 | 1169 | MALPVTALLLPLALLLHAARPEVVLTQSPATLSLSPGERATLSCRASKSISKDLAWYQQK |
| AA | | PGQAPRLLIYSGSTLQSGIPARFSGSGSGTDFTLTISSLEPEDFAVYYCQQHNKYPYTFG |
| | | GGTKVEIKGGGGSGGGGSGGGGSGGGGSQVQLVQSGAEVKKPGASVKVSCKASGYTFTSY |
| | | WMNWVRQAPGQGLEWMGRIDPYDSETHYNQKFKDRVTMTVDKSTSTAYMELSSLRSEDTA |
| | | VYYCARGNWDDYWGQGTTVTVSSTTTPAPRPPTPAPTIASQPLSLRPEACRPAAGGAVHT |
| | | RGLDFACDIYIWAPLAGTCGVLLLSLVITLYCKRGRKKLLYIFKQPFMRPVQTTQEEDGC |
| | | SCRFPEEEEGGCELRVKFSRSADAPAYKQGQNQLYNELNLGRREEYDVLDKRRGRDPEMG |
| | | GKPRRKNPQEGLYNELQKDKMAEAYSEIGMKGERRRGKGHDGLYQGLSTATKDTYDALHM |
| | | QALPPR |
| hzCAR123-6 | 1170 | MALPVTALLLPLALLLHAARPEVVLTQSPATLSLSPGERATLSCRASKSISKDLAWYQQK |
| scFv | | PGQAPRLLIYSGSTLQSGIPARFSGSGSGTDFTLTISSLEPEDFAVYYCQQHNKYPYTFG |
| | | GGTKVEIKGGGGSGGGGSGGGGSGGGGSQVQLVQSGAEVKKPGASVKVSCKASGYTFTSY |
| | | WMNWVRQAPGQGLEWMGRIDPYDSETHYNQKFKDRVTMTVDKSTSTAYMELSSLRSEDTA |
| | | VYYCARGNWDDYWGQGTTVTVSS |
| hzCAR123-6 | 1171 | QVQLVQSGAEVKKPGASVKVSCKASGYTFTSYWMNWVRQAPGQGLEWMGRIDPYDSETHYNQ |
| VH | | KFKDRVTMTVDKSTSTAYMELSSLRSEDTAVYYCARGNWDDYWGQGTTVTVSS |
| hzCAR123-6 | 1172 | EVVLTQSPATLSLSPGERATLSCRASKSISKDLAWYQQKPGQAPRLLIYSGSTLQSGIPARF |
| VL | | SGSGSGTDFTLTISSLEPEDFAVYYCQQHNKYPYTFGGGTKVEIK |
| hzCAR123-7 | 1173 | ATGGCCCTCCCTGTCACCGCCCTGCTGCTTCCGCTGGCTCTTCTGCTCCACGCCGCTCGGCC |
| NT | | CGACGTCGTGATGACCCAGTCACCGGCATTCCTGTCCGTGACTCCCGGAGAAAAGGTCACGA |
| | | TTACTTGCCGGGCGTCCAAGAGCATCTCCAAGGACCTCGCCTGGTACCAACAGAAGCCGGAC |
| | | CAGGCCCCTAAGCTGTTGATCTACTCGGGGTCCACCCTTCAATCGGGAGTGCCATCGCGGTT |
| | | TAGCGGTTCGGGTTCTGGGACCGACTTCACTTTCACCATCTCCTCACTGGAAGCCGAGGATG |
| | | CCGCCACTTACTACTGTCAGCAGCACAACAAGTATCCGTACACCTTCGGAGGCGGTACCAAA |
| | | GTGGAGATCAAGGGGGGTGGCGGTAGCGGAGGAGGGGGCTCCGGCGGCGGCGGCTCAGGGGG |
| | | CGGAGGAAGCCAAGTGCAGCTGGTCCAGTCGGGAGCCGAAGTCAAGAAGCCCGGCGCTAGCG |
| | | TGAAAGTGTCCTGCAAAGCCTCCGGGTACACATTCACCTCCTACTGGATGAATTGGGTCAGA |
| | | CAGGCGCCCGGCCAGGGACTCGAGTGGATGGGAAGGATTGATCCTTACGACTCCGAAACCCA |
| | | TTACAACCAGAAGTTCAAGGACCGCGTGACCATGACTGTGGATAAGTCCACTTCCACCGCTT |
| | | ACATGGAGCTGTCCAGCCTGCGCTCCGAGGATACCGCAGTGTACTACTGCGCCCGGGGAAAC |
| | | TGGGACGACTATTGGGGACAGGGAACTACCGTGACCGTGTCAAGCACCACTACCCCAGCACC |
| | | GAGGCCACCCACCCCGGCTCCTACCATCGCCTCCCAGCCTCTGTCCCTGCGTCCGGAggcat |
| | | gtagacccgcagctggtggggccgtgcatacccggggtcttgacttcgcctgcgatatctac |
| | | atttgggcccctctggctggtacttgcggggtcctgctgctttcactcgtgatcactcttta |
| | | ctgtaagcgcggtcggaagaagctgctgtacatctttaagcaacccttcatgaggcctgtgc |
| | | agactactcaagaggaggacggctgttcatgccggttcccagaggaggaggaaggcggctgc |
| | | gaactgcgcgtgaaattcagccgcagcgcagatgctccagcctacaagcaggggcagaacca |
| | | gctctacaacgaactcaatcttggtcggagagaggagtacgacgtgctggacaagcggagag |
| | | gacgggacccagaaatgggcgggaagccgcgcagaaagaatccccaagagggcctgtacaac |
| | | gagctccaaaaggataagatggcagaagcctatagcgagattggtatgaaaggggaacgcag |
| | | aagaggcaaaggccacgacggactgtaccagggactcagcaccgccaccaaggacacctatg |
| | | acgctcttcacatgcaggccctgccgcctcgg |
| hzCAR123-7 | 1174 | MALPVTALLLPLALLLHAARPDVVMTQSPAFLSVTPGEKVTITCRASKSISKDLAWYQQK |
| AA | | PDQAPKLLIYSGSTLQSGVPSRFSGSGSGTDFTFTISSLEAEDAATYYCQQHNKYPYTFG |
| | | GGTKVEIKGGGGSGGGGSGGGGSGGGGSQVQLVQSGAEVKKPGASVKVSCKASGYTFTSY |
| | | WMNWVRQAPGQGLEWMGRIDPYDSETHYNQKFKDRVTMTVDKSTSTAYMELSSLRSEDTA |
| | | VYYCARGNWDDYWGQGTTVTVSSTTTPAPRPPTPAPTIASQPLSLRPEACRPAAGGAVHT |
| | | RGLDFACDIYIWAPLAGTCGVLLLSLVITLYCKRGRKKLLYIFKQPFMRPVQTTQEEDGC |
| | | SCRFPEEEEGGCELRVKFSRSADAPAYKQGQNQLYNELNLGRREEYDVLDKRRGRDPEMG |
| | | GKPRRKNPQEGLYNELQKDKMAEAYSEIGMKGERRRGKGHDGLYQGLSTATKDTYDALHM |
| | | QALPPR |
| hzCAR123-7 | 1175 | MALPVTALLLPLALLLHAARPDVVMTQSPAFLSVTPGEKVTITCRASKSISKDLAWYQQK |
| scFv | | PDQAPKLLIYSGSTLQSGVPSRFSGSGSGTDFTFTISSLEAEDAATYYCQQHNKYPYTFG |
| | | GGTKVEIKGGGGSGGGGSGGGGSGGGGSQVQLVQSGAEVKKPGASVKVSCKASGYTFTSY |
| | | WMNWVRQAPGQGLEWMGRIDPYDSETHYNQKFKDRVTMTVDKSTSTAYMELSSLRSEDTA |
| | | VYYCARGNWDDYWGQGTTVTVSS |
| hzCAR123-7 | 1176 | QVQLVQSGAEVKKPGASVKVSCKASGYTFTSYWMNWVRQAPGQGLEWMGRIDPYDSETHYNQ |
| VH | | KFKDRVTMTVDKSTSTAYMELSSLRSEDTAVYYCARGNWDDYWGQGTTVTVSS |
| hzCAR123-7 | 1177 | DVVMTQSPAFLSVTPGEKVTITCRASKSISKDLAWYQQKPDQAPKLLIYSGSTLQSGVPSRF |
| VL | | SGSGSGTDFTFTISSLEAEDAATYYCQQHNKYPYTFGGGTKVEIK |
| hzCAR123-8 | 1178 | ATGGCCCTCCCTGTCACCGCCCTGCTGCTTCCGCTGGCTCTTCTGCTCCACGCCGCTCGGCC |
| NT | | CGACGTGGTCATGACTCAGTCCCCGGACTCACTCGCGGTGTCGCTTGGAGAGAGAGCGACCA |
| | | TCAACTGTCGGGCCTCAAAGAGCATCAGCAAGGACCTGGCCTGGTACCAGCAGAAGCCGGGA |
| | | CAGCCGCCAAAGCTGCTGATCTACTCCGGGTCCACCTTGCAATCTGGTGTCCCTGACCGGTT |
| | | CTCCGGTTCCGGGTCGGGTACCGACTTCACGCTCACTATTTCGTCGCTGCAAGCCGAAGATG |
| | | TGGCCGTGTACTATTGCCAACAGCACAACAAGTACCCCTACACTTTTGGCGGAGGCACCAAG |
| | | GTGGAAATCAAGGGGGGTGGCGGTAGCGGAGGAGGGGGCTCCGGCGGCGGCGGCTCAGGGGG |
| | | CGGAGGAAGCCAAGTGCAGCTGGTCCAGTCGGGAGCCGAAGTCAAGAAGCCCGGCGCTAGCG |
| | | TGAAAGTGTCCTGCAAAGCCTCCGGGTACACATTCACCTCCTACTGGATGAATTGGGTCAGA |
| | | CAGGCGCCCGGCCAGGGACTCGAGTGGATGGGAAGGATTGATCCTTACGACTCCGAAACCCA |
| | | TTACAACCAGAAGTTCAAGGACCGCGTGACCATGACTGTGGATAAGTCCACTTCCACCGCTT |
| | | ACATGGAGCTGTCCAGCCTGCGCTCCGAGGATACCGCAGTGTACTACTGCGCCCGGGGAAAC |
| | | TGGGACGACTATTGGGGACAGGGAACTACCGTGACCGTGTCAAGCACCACTACCCCAGCACC |
| | | GAGGCCACCCACCCCGGCTCCTACCATCGCCTCCCAGCCTCTGTCCCTGCGTCCGGAggcat |
| | | gtagacccgcagctggtggggccgtgcatacccggggtcttgacttcgcctgcgatatctac |
| | | atttgggcccctctggctggtacttgcggggtcctgctgctttcactcgtgatcactcttta |
| | | ctgtaagcgcggtcggaagaagctgctgtacatctttaagcaacccttcatgaggcctgtgc |
| | | agactactcaagaggaggacggctgttcatgccggttcccagaggaggaggaaggcggctgc |
| | | gaactgcgcgtgaaattcagccgcagcgcagatgctccagcctacaagcaggggcagaacca |
| | | gctctacaacgaactcaatcttggtcggagagaggagtacgacgtgctggacaagcggagag |
| | | gacgggacccagaaatgggcgggaagccgcgcagaaagaatccccaagagggcctgtacaac |
| | | gagctccaaaaggataagatggcagaagcctatagcgagattggtatgaaaggggaacgcag |
| | | aagaggcaaaggccacgacggactgtaccagggactcagcaccgccaccaaggacacctatg |
| | | acgctcttcacatgcaggccctgccgcctcgg |
| hzCAR123-8 | 1179 | MALPVTALLLPLALLLHAARPDVVMTQSPDSLAVSLGERATINCRASKSISKDLAWYQQK |
| AA | | PGQPPKLLIYSGSTLQSGVPDRFSGSGSGTDFTLTISSLQAEDVAVYYCQQHNKYPYTFG |
| | | GGTKVEIKGGGGSGGGGSGGGGSGGGGSQVQLVQSGAEVKKPGASVKVSCKASGYTFTSY |
| | | WMNWVRQAPGQGLEWMGRIDPYDSETHYNQKFKDRVTMTVDKSTSTAYMELSSLRSEDTA |
| | | VYYCARGNWDDYWGQGTTVTVSSTTTPAPRPPTPAPTIASQPLSLRPEACRPAAGGAVHT |
| | | RGLDFACDIYIWAPLAGTCGVLLLSLVITLYCKRGRKKLLYIFKQPFMRPVQTTQEEDGC |
| | | SCRFPEEEEGGCELRVKFSRSADAPAYKQGQNQLYNELNLGRREEYDVLDKRRGRDPEMG |
| | | GKPRRKNPQEGLYNELQKDKMAEAYSEIGMKGERRRGKGHDGLYQGLSTATKDTYDALHM |
| | | QALPPR |
| hzCAR123-8 | 1180 | MALPVTALLLPLALLLHAARPDVVMTQSPDSLAVSLGERATINCRASKSISKDLAWYQQK |
| scFv | | PGQPPKLLIYSGSTLQSGVPDRFSGSGSGTDFTLTISSLQAEDVAVYYCQQHNKYPYTFG |
| | | GGTKVEIKGGGGSGGGGSGGGGSGGGGSQVQLVQSGAEVKKPGASVKVSCKASGYTFTSY |
| | | WMNWVRQAPGQGLEWMGRIDPYDSETHYNQKFKDRVTMTVDKSTSTAYMELSSLRSEDTA |
| | | VYYCARGNWDDYWGQGTTVTVSS |
| hzCAR123-8 | 1181 | QVQLVQSGAEVKKPGASVKVSCKASGYTFTSYWMNWVRQAPGQGLEWMGRIDPYDSETHYNQ |
| VH | | KFKDRVTMTVDKSTSTAYMELSSLRSEDTAVYYCARGNWDDYWGQGTTVTVSS |
| hzCAR123-8 | 1182 | DVVMTQSPDSLAVSLGERATINCRASKSISKDLAWYQQKPGQPPKLLIYSGSTLQSGVPDRF |
| VL | | SGSGSGTDFTLTISSLQAEDVAVYYCQQHNKYPYTFGGGTKVEIK |
| hzCAR123-9 | 1183 | ATGGCCCTCCCTGTCACCGCCCTGCTGCTTCCGCTGGCTCTTCTGCTCCACGCCGCTCGGCC |
| NT | | CCAAGTGCAGCTGGTGCAGTCAGGCAGCGAACTGAAGAAGCCCGGAGCCTCCGTCAAAGTGT |
| | | CCTGCAAAGCCTCGGGATACACCTTCACCTCCTACTGGATGAACTGGGTCCGCCAGGCACCT |
| | | GGACAGGGGCTGGAGTGGATGGGAAGGATCGATCCCTACGATTCCGAAACCCATTACAATCA |
| | | GAAGTTCAAGGACCGGTTTGTGTTCTCCGTGGACAAGTCCGTGTCCACCGCCTACCTCCAAA |
| | | TTAGCAGCCTGAAGGCGGAGGATACAGCTGTCTACTACTGCGCTCGCGGAAACTGGGATGAC |
| | | TATTGGGGCCAGGGAACTACCGTGACTGTGTCCTCCGGGGGTGGCGGTAGCGGAGGAGGGGG |
| | | CTCCGGCGGCGGCGGCTCAGGGGGCGGAGGAAGCGACGTGCAGCTCACCCAGTCGCCCTCAT |
| | | TTCTGTCGGCCTCAGTGGGAGACAGAGTGACCATTACTTGTCGGGCCTCCAAGAGCATCTCC |
| | | AAGGACCTGGCCTGGTATCAGCAGAAGCCAGGAAAGGCGCCTAAGTTGCTCATCTACTCGGG |
| | | GTCGACCCTGCAATCTGGCGTGCCGTCCCGGTTCTCCGGTTCGGGAAGCGGTACCGAATTCA |
| | | CCCTTACTATCTCCTCCCTGCAACCGGAGGACTTCGCCACCTACTACTGCCAACAGCACAAC |
| | | AAGTACCCGTACACTTTCGGGGGTGGCACGAAGGTCGAAATCAAGACCACTACCCCAGCACC |
| | | GAGGCCACCCACCCCGGCTCCTACCATCGCCTCCCAGCCTCTGTCCCTGCGTCCGGAggcat |
| | | gtagacccgcagctggtggggccgtgcatacccggggtcttgacttcgcctgcgatatctac |
| | | atttgggcccctctggctggtacttgcggggtcctgctgctttcactcgtgatcactcttta |
| | | ctgtaagcgcggtcggaagaagctgctgtacatctttaagcaacccttcatgaggcctgtgc |
| | | agactactcaagaggaggacggctgttcatgccggttcccagaggaggaggaaggcggctgc |
| | | gaactgcgcgtgaaattcagccgcagcgcagatgctccagcctacaagcaggggcagaacca |
| | | gctctacaacgaactcaatcttggtcggagagaggagtacgacgtgctggacaagcggagag |
| | | gacgggacccagaaatgggcgggaagccgcgcagaaagaatccccaagagggcctgtacaac |
| | | gagctccaaaaggataagatggcagaagcctatagcgagattggtatgaaaggggaacgcag |
| | | aagaggcaaaggccacgacggactgtaccagggactcagcaccgccaccaaggacacctatg |
| | | acgctcttcacatgcaggccctgccgcctcgg |
| hzCAR123-9 | 1184 | MALPVTALLLPLALLLHAARPQVQLVQSGSELKKPGASVKVSCKASGYTFTSYWMNWVRQ |
| AA | | APGQGLEWMGRIDPYDSETHYNQKFKDRFVFSVDKSVSTAYLQISSLKAEDTAVYYCARG |
| | | NWDDYWGQGTTVTVSSGGGGSGGGGSGGGGSGGGGSDVQLTQSPSFLSASVGDRVTITCR |
| | | ASKSISKDLAWYQQKPGKAPKLLIYSGSTLQSGVPSRFSGSGSGTEFTLTISSLQPEDFA |
| | | TYYCQQHNKYPYTFGGGTKVEIKTTTPAPRPPTPAPTIASQPLSLRPEACRPAAGGAVHT |
| | | RGLDFACDIYIWAPLAGTCGVLLLSLVITLYCKRGRKKLLYIFKQPFMRPVQTTQEEDGC |
| | | SCRFPEEEEGGCELRVKFSRSADAPAYKQGQNQLYNELNLGRREEYDVLDKRRGRDPEMG |
| | | GKPRRKNPQEGLYNELQKDKMAEAYSEIGMKGERRRGKGHDGLYQGLSTATKDTYDALHM |
| | | QALPPR |
| hzCAR123-9 | 1185 | MALPVTALLLPLALLLHAARPQVQLVQSGSELKKPGASVKVSCKASGYTFTSYWMNWVRQ |
| scFv | | APGQGLEWMGRIDPYDSETHYNQKFKDRFVFSVDKSVSTAYLQISSLKAEDTAVYYCARG |
| | | NWDDYWGQGTTVTVSSGGGGSGGGGSGGGGSGGGGSDVQLTQSPSFLSASVGDRVTITCR |
| | | ASKSISKDLAWYQQKPGKAPKLLIYSGSTLQSGVPSRFSGSGSGTEFTLTISSLQPEDFA |
| | | TYYCQQHNKYPYTFGGGTKVEIK |
| hzCAR123-9 | 1186 | QVQLVQSGSELKKPGASVKVSCKASGYTFTSYWMNWVRQAPGQGLEWMGRIDPYDSETHYNQ |
| VH | | KFKDRFVFSVDKSVSTAYLQISSLKAEDTAVYYCARGNWDDYWGQGTTVTVSS |
| hzCAR123-10 | 1187 | DVQLTQSPSFLSASVGDRVTITCRASKSISKDLAWYQQKPGKAPKLLIYSGSTLQSGVPSRF |
| VL | | SGSGSGTEFTLTISSLQPEDFATYYCQQHNKYPYTFGGGTKVEIK |
| hzCAR123-10 | 1188 | ATGGCCCTCCCTGTCACCGCCCTGCTGCTTCCGCTGGCTCTTCTGCTCCACGCCGCTCGGCC |
| NT | | CCAAGTGCAGCTGGTGCAGTCAGGCAGCGAACTGAAGAAGCCCGGAGCCTCCGTCAAAGTGT |
| | | CCTGCAAAGCCTCGGGATACACCTTCACCTCCTACTGGATGAACTGGGTCCGCCAGGCACCT |
| | | GGACAGGGGCTGGAGTGGATGGGAAGGATCGATCCCTACGATTCCGAAACCCATTACAATCA |
| | | GAAGTTCAAGGACCGGTTTGTGTTCTCCGTGGACAAGTCCGTGTCCACCGCCTACCTCCAAA |
| | | TTAGCAGCCTGAAGGCGGAGGATACAGCTGTCTACTACTGCGCTCGCGGAAACTGGGATGAC |
| | | TATTGGGGCCAGGGAACTACCGTGACTGTGTCCTCCGGGGGTGGCGGTAGCGGAGGAGGGGG |
| | | CTCCGGCGGCGGCGGCTCAGGGGGCGGAGGAAGCGAAGTGGTGCTGACCCAGTCGCCCGCAA |
| | | CCCTCTCTCTGTCGCCGGGAGAACGCGCCACTCTTTCCTGTCGGGCGTCCAAGAGCATCTCA |
| | | AAGGACCTCGCCTGGTACCAGCAGAAGCCTGGTCAAGCCCCGCGGCTGCTGATCTACTCCGG |
| | | CTCCACGCTGCAATCAGGAATCCCAGCCAGATTTTCCGGTTCGGGGTCGGGGACTGACTTCA |
| | | CCTTGACCATTAGCTCGCTGGAACCTGAGGACTTCGCCGTGTATTACTGCCAGCAGCACAAC |
| | | AAGTACCCGTACACCTTCGGAGGCGGTACTAAGGTCGAGATCAAGACCACTACCCCAGCACC |
| | | GAGGCCACCCACCCCGGCTCCTACCATCGCCTCCCAGCCTCTGTCCCTGCGTCCGGAggcat |
| | | gtagacccgcagctggtggggccgtgcatacccggggtcttgacttcgcctgcgatatctac |
| | | atttgggcccctctggctggtacttgcggggtcctgctgctttcactcgtgatcactcttta |
| | | ctgtaagcgcggtcggaagaagctgctgtacatctttaagcaacccttcatgaggcctgtgc |
| | | agactactcaagaggaggacggctgttcatgccggttcccagaggaggaggaaggcggctgc |
| | | gaactgcgcgtgaaattcagccgcagcgcagatgctccagcctacaagcaggggcagaacca |
| | | gctctacaacgaactcaatcttggtcggagagaggagtacgacgtgctggacaagcggagag |
| | | gacgggacccagaaatgggcgggaagccgcgcagaaagaatccccaagagggcctgtacaac |
| | | gagctccaaaaggataagatggcagaagcctatagcgagattggtatgaaaggggaacgcag |
| | | aagaggcaaaggccacgacggactgtaccagggactcagcaccgccaccaaggacacctatg |
| | | acgctcttcacatgcaggccctgccgcctcgg |
| hzCAR123-10 | 1189 | MALPVTALLLPLALLLHAARPQVQLVQSGSELKKPGASVKVSCKASGYTFTSYWMNWVRQ |
| AA | | APGQGLEWMGRIDPYDSETHYNQKFKDRFVFSVDKSVSTAYLQISSLKAEDTAVYYCARG |
| | | NWDDYWGQGTTVTVSSGGGGSGGGGSGGGGSGGGGSEVVLTQSPATLSLSPGERATLSCR |
| | | ASKSISKDLAWYQQKPGQAPRLLIYSGSTLQSGIPARFSGSGSGTDFTLTISSLEPEDFA |
| | | VYYCQQHNKYPYTFGGGTKVEIKTTTPAPRPPTPAPTIASQPLSLRPEACRPAAGGAVHT |
| | | RGLDFACDIYIWAPLAGTCGVLLLSLVITLYCKRGRKKLLYIFKQPFMRPVQTTQEEDGC |
| | | SCRFPEEEEGGCELRVKFSRSADAPAYKQGQNQLYNELNLGRREEYDVLDKRRGRDPEMG |
| | | GKPRRKNPQEGLYNELQKDKMAEAYSEIGMKGERRRGKGHDGLYQGLSTATKDTYDALHM |
| | | QALPPR |
| hzCAR123-10 | 1190 | MALPVTALLLPLALLLHAARPQVQLVQSGSELKKPGASVKVSCKASGYTFTSYWMNWVRQ |
| scFv | | APGQGLEWMGRIDPYDSETHYNQKFKDRFVFSVDKSVSTAYLQISSLKAEDTAVYYCARG |
| | | NWDDYWGQGTTVTVSSGGGGSGGGGSGGGGSGGGGSEVVLTQSPATLSLSPGERATLSCR |
| | | ASKSISKDLAWYQQKPGQAPRLLIYSGSTLQSGIPARFSGSGSGTDFTLTISSLEPEDFA |
| | | VYYCQQHNKYPYTFGGGTKVEIK |
| hzCAR123-10 | 1191 | QVQLVQSGSELKKPGASVKVSCKASGYTFTSYWMNWVRQAPGQGLEWMGRIDPYDSETHYNQ |
| VH | | KFKDRFVFSVDKSVSTAYLQISSLKAEDTAVYYCARGNWDDYWGQGTTVTVSS |
| hzCAR123-10 | 1192 | EVVLTQSPATLSLSPGERATLSCRASKSISKDLAWYQQKPGQAPRLLIYSGSTLQSGIPARF |
| VL | | SGSGSGTDFTLTISSLEPEDFAVYYCQQHNKYPYTFGGGTKVEIK |
| hzCAR123-11 | 1193 | ATGGCCCTCCCTGTCACCGCCCTGCTGCTTCCGCTGGCTCTTCTGCTCCACGCCGCTCGGCC |
| NT | | CCAAGTGCAGCTGGTGCAGTCAGGCAGCGAACTGAAGAAGCCCGGAGCCTCCGTCAAAGTGT |
| | | CCTGCAAAGCCTCGGGATACACCTTCACCTCCTACTGGATGAACTGGGTCCGCCAGGCACCT |
| | | GGACAGGGGCTGGAGTGGATGGGAAGGATCGATCCCTACGATTCCGAAACCCATTACAATCA |
| | | GAAGTTCAAGGACCGGTTTGTGTTCTCCGTGGACAAGTCCGTGTCCACCGCCTACCTCCAAA |
| | | TTAGCAGCCTGAAGGCGGAGGATACAGCTGTCTACTACTGCGCTCGCGGAAACTGGGATGAC |
| | | TATTGGGGCCAGGGAACTACCGTGACTGTGTCCTCCGGGGGTGGCGGTAGCGGAGGAGGGGG |
| | | CTCCGGCGGCGGCGGCTCAGGGGGCGGAGGAAGCGACGTCGTGATGACCCAGTCACCGGCAT |
| | | TCCTGTCCGTGACTCCCGGAGAAAAGGTCACGATTACTTGCCGGGCGTCCAAGAGCATCTCC |
| | | AAGGACCTCGCCTGGTACCAACAGAAGCCGGACCAGGCCCCTAAGCTGTTGATCTACTCGGG |
| | | GTCCACCCTTCAATCGGGAGTGCCATCGCGGTTTAGCGGTTCGGGTTCTGGGACCGACTTCA |
| | | CTTTCACCATCTCCTCACTGGAAGCCGAGGATGCCGCCACTTACTACTGTCAGCAGCACAAC |
| | | AAGTATCCGTACACCTTCGGAGGCGGTACCAAAGTGGAGATCAAGACCACTACCCCAGCACC |
| | | GAGGCCACCCACCCCGGCTCCTACCATCGCCTCCCAGCCTCTGTCCCTGCGTCCGGAggcat |
| | | gtagacccgcagctggtggggccgtgcatacccggggtcttgacttcgcctgcgatatctac |
| | | atttgggcccctctggctggtacttgcggggtcctgctgctttcactcgtgatcactcttta |
| | | ctgtaagcgcggtcggaagaagctgctgtacatctttaagcaacccttcatgaggcctgtgc |
| | | agactactcaagaggaggacggctgttcatgccggttcccagaggaggaggaaggcggctgc |
| | | gaactgcgcgtgaaattcagccgcagcgcagatgctccagcctacaagcaggggcagaacca |
| | | gctctacaacgaactcaatcttggtcggagagaggagtacgacgtgctggacaagcggagag |
| | | gacgggacccagaaatgggcgggaagccgcgcagaaagaatccccaagagggcctgtacaac |
| | | gagctccaaaaggataagatggcagaagcctatagcgagattggtatgaaaggggaacgcag |
| | | aagaggcaaaggccacgacggactgtaccagggactcagcaccgccaccaaggacacctatg |
| | | acgctcttcacatgcaggccctgccgcctcgg |
| hzCAR123-11 | 1194 | MALPVTALLLPLALLLHAARPQVQLVQSGSELKKPGASVKVSCKASGYTFTSYWMNWVRQ |
| AA | | APGQGLEWMGRIDPYDSETHYNQKFKDRFVFSVDKSVSTAYLQISSLKAEDTAVYYCARG |
| | | NWDDYWGQGTTVTVSSGGGGSGGGGSGGGGSGGGGSDVVMTQSPAFLSVTPGEKVTITCR |
| | | ASKSISKDLAWYQQKPDQAPKLLIYSGSTLQSGVPSRFSGSGSGTDFTFTISSLEAEDAA |
| | | TYYCQQHNKYPYTFGGGTKVEIKTTTPAPRPPTPAPTIASQPLSLRPEACRPAAGGAVHT |
| | | RGLDFACDIYIWAPLAGTCGVLLLSLVITLYCKRGRKKLLYIFKQPFMRPVQTTQEEDGC |
| | | SCRFPEEEEGGCELRVKFSRSADAPAYKQGQNQLYNELNLGRREEYDVLDKRRGRDPEMG |
| | | GKPRRKNPQEGLYNELQKDKMAEAYSEIGMKGERRRGKGHDGLYQGLSTATKDTYDALHM |
| | | QALPPR |
| hzCAR123-11 | 1195 | MALPVTALLLPLALLLHAARPQVQLVQSGSELKKPGASVKVSCKASGYTFTSYWMNWVRQ |
| scFv | | APGQGLEWMGRIDPYDSETHYNQKFKDRFVFSVDKSVSTAYLQISSLKAEDTAVYYCARG |
| | | NWDDYWGQGTTVTVSSGGGGSGGGGSGGGGSGGGGSDVVMTQSPAFLSVTPGEKVTITCR |
| | | ASKSISKDLAWYQQKPDQAPKLLIYSGSTLQSGVPSRFSGSGSGTDFTFTISSLEAEDAA |
| | | TYYCQQHNKYPYTFGGGTKVEIK |
| hzCAR123-11 | 1196 | QVQLVQSGSELKKPGASVKVSCKASGYTFTSYWMNWVRQAPGQGLEWMGRIDPYDSETHYNQ |
| VH | | KFKDRFVFSVDKSVSTAYLQISSLKAEDTAVYYCARGNWDDYWGQGTTVTVSS |
| hzCAR123-11 | 1197 | DVVMTQSPAFLSVTPGEKVTITCRASKSISKDLAWYQQKPDQAPKLLIYSGSTLQSGVPSRF |
| VL | | SGSGSGTDFTFTISSLEAEDAATYYCQQHNKYPYTFGGGTKVEIK |
| hzCAR123-12 | 1198 | ATGGCCCTCCCTGTCACCGCCCTGCTGCTTCCGCTGGCTCTTCTGCTCCACGCCGCTCGGCC |
| NT | | CCAAGTGCAGCTGGTGCAGTCAGGCAGCGAACTGAAGAAGCCCGGAGCCTCCGTCAAAGTGT |
| | | CCTGCAAAGCCTCGGGATACACCTTCACCTCCTACTGGATGAACTGGGTCCGCCAGGCACCT |
| | | GGACAGGGGCTGGAGTGGATGGGAAGGATCGATCCCTACGATTCCGAAACCCATTACAATCA |
| | | GAAGTTCAAGGACCGGTTTGTGTTCTCCGTGGACAAGTCCGTGTCCACCGCCTACCTCCAAA |
| | | TTAGCAGCCTGAAGGCGGAGGATACAGCTGTCTACTACTGCGCTCGCGGAAACTGGGATGAC |
| | | TATTGGGGCCAGGGAACTACCGTGACTGTGTCCTCCGGGGGTGGCGGTAGCGGAGGAGGGGG |
| | | CTCCGGCGGCGGCGGCTCAGGGGGCGGAGGAAGCGACGTGGTCATGACTCAGTCCCCGGACT |
| | | CACTCGCGGTGTCGCTTGGAGAGAGAGCGACCATCAACTGTCGGGCCTCAAAGAGCATCAGC |
| | | AAGGACCTGGCCTGGTACCAGCAGAAGCCGGGACAGCCGCCAAAGCTGCTGATCTACTCCGG |
| | | GTCCACCTTGCAATCTGGTGTCCCTGACCGGTTCTCCGGTTCCGGGTCGGGTACCGACTTCA |
| | | CGCTCACTATTTCGTCGCTGCAAGCCGAAGATGTGGCCGTGTACTATTGCCAACAGCACAAC |
| | | AAGTACCCCTACACTTTTGGCGGAGGCACCAAGGTGGAAATCAAGACCACTACCCCAGCACC |
| | | GAGGCCACCCACCCCGGCTCCTACCATCGCCTCCCAGCCTCTGTCCCTGCGTCCGGAggcat |
| | | gtagacccgcagctggtggggccgtgcatacccggggtcttgacttcgcctgcgatatctac |
| | | atttgggcccctctggctggtacttgcggggtcctgctgctttcactcgtgatcactcttta |
| | | ctgtaagcgcggtcggaagaagctgctgtacatctttaagcaacccttcatgaggcctgtgc |
| | | agactactcaagaggaggacggctgttcatgccggttcccagaggaggaggaaggcggctgc |
| | | gaactgcgcgtgaaattcagccgcagcgcagatgctccagcctacaagcaggggcagaacca |
| | | gctctacaacgaactcaatcttggtcggagagaggagtacgacgtgctggacaagcggagag |
| | | gacgggacccagaaatgggcgggaagccgcgcagaaagaatccccaagagggcctgtacaac |
| | | gagctccaaaaggataagatggcagaagcctatagcgagattggtatgaaaggggaacgcag |
| | | aagaggcaaaggccacgacggactgtaccagggactcagcaccgccaccaaggacacctatg |
| | | acgctcttcacatgcaggccctgccgcctcgg |
| hzCAR123-12 | 1199 | MALPVTALLLPLALLLHAARPQVQLVQSGSELKKPGASVKVSCKASGYTFTSYWMNWVRQ |
| AA | | APGQGLEWMGRIDPYDSETHYNQKFKDRFVFSVDKSVSTAYLQISSLKAEDTAVYYCARG |
| | | NWDDYWGQGTTVTVSSGGGGSGGGGSGGGGSGGGGSDVVMTQSPDSLAVSLGERATINCR |
| | | ASKSISKDLAWYQQKPGQPPKLLIYSGSTLQSGVPDRFSGSGSGTDFTLTISSLQAEDVA |
| | | VYYCQQHNKYPYTFGGGTKVEIKTTTPAPRPPTPAPTIASQPLSLRPEACRPAAGGAVHT |
| | | RGLDFACDIYIWAPLAGTCGVLLLSLVITLYCKRGRKKLLYIFKQPFMRPVQTTQEEDGC |
| | | SCRFPEEEEGGCELRVKFSRSADAPAYKQGQNQLYNELNLGRREEYDVLDKRRGRDPEMG |
| | | GKPRRKNPQEGLYNELQKDKMAEAYSEIGMKGERRRGKGHDGLYQGLSTATKDTYDALHM |
| | | QALPPR |
| hzCAR123-12 | 1200 | MALPVTALLLPLALLLHAARPQVQLVQSGSELKKPGASVKVSCKASGYTFTSYWMNWVRQ |
| scFv | | APGQGLEWMGRIDPYDSETHYNQKFKDRFVFSVDKSVSTAYLQISSLKAEDTAVYYCARG |
| | | NWDDYWGQGTTVTVSSGGGGSGGGGSGGGGSGGGGSDVVMTQSPDSLAVSLGERATINCR |
| | | ASKSISKDLAWYQQKPGQPPKLLIYSGSTLQSGVPDRFSGSGSGTDFTLTISSLQAEDVA |
| | | VYYCQQHNKYPYTFGGGTKVEIK |
| hzCAR123-12 | 1201 | QVQLVQSGSELKKPGASVKVSCKASGYTFTSYWMNWVRQAPGQGLEWMGRIDPYDSETHYNQ |
| VH | | KFKDRFVFSVDKSVSTAYLQISSLKAEDTAVYYCARGNWDDYWGQGTTVTVSS |
| hzCAR123-12 | 1202 | DVVMTQSPDSLAVSLGERATINCRASKSISKDLAWYQQKPGQPPKLLIYSGSTLQSGVPDRF |
| VL | | SGSGSGTDFTLTISSLQAEDVAVYYCQQHNKYPYTFGGGTKVEIK |
| hzCAR123-13 | 1203 | ATGGCCCTCCCTGTCACCGCCCTGCTGCTTCCGCTGGCTCTTCTGCTCCACGCCGCTCGGCC |
| NT | | CGACGTGCAGCTCACCCAGTCGCCCTCATTTCTGTCGGCCTCAGTGGGAGACAGAGTGACCA |
| | | TTACTTGTCGGGCCTCCAAGAGCATCTCCAAGGACCTGGCCTGGTATCAGCAGAAGCCAGGA |
| | | AAGGCGCCTAAGTTGCTCATCTACTCGGGGTCGACCCTGCAATCTGGCGTGCCGTCCCGGTT |
| | | CTCCGGTTCGGGAAGCGGTACCGAATTCACCCTTACTATCTCCTCCCTGCAACCGGAGGACT |
| | | TCGCCACCTACTACTGCCAACAGCACAACAAGTACCCGTACACTTTCGGGGGTGGCACGAAG |
| | | GTCGAAATCAAGGGGGGTGGCGGTAGCGGAGGAGGGGGCTCCGGCGGCGGCGGCTCAGGGGG |
| | | CGGAGGAAGCCAAGTGCAGCTGGTGCAGTCAGGCAGCGAACTGAAGAAGCCCGGAGCCTCCG |
| | | TCAAAGTGTCCTGCAAAGCCTCGGGATACACCTTCACCTCCTACTGGATGAACTGGGTCCGC |
| | | CAGGCACCTGGACAGGGGCTGGAGTGGATGGGAAGGATCGATCCCTACGATTCCGAAACCCA |
| | | TTACAATCAGAAGTTCAAGGACCGGTTTGTGTTCTCCGTGGACAAGTCCGTGTCCACCGCCT |
| | | ACCTCCAAATTAGCAGCCTGAAGGCGGAGGATACAGCTGTCTACTACTGCGCTCGCGGAAAC |
| | | TGGGATGACTATTGGGGCCAGGGAACTACCGTGACTGTGTCCTCCACCACTACCCCAGCACC |
| | | GAGGCCACCCACCCCGGCTCCTACCATCGCCTCCCAGCCTCTGTCCCTGCGTCCGGAggcat |
| | | gtagacccgcagctggtggggccgtgcatacccggggtcttgacttcgcctgcgatatctac |
| | | atttgggcccctctggctggtacttgcggggtcctgctgctttcactcgtgatcactcttta |
| | | ctgtaagcgcggtcggaagaagctgctgtacatctttaagcaacccttcatgaggcctgtgc |
| | | agactactcaagaggaggacggctgttcatgccggttcccagaggaggaggaaggcggctgc |
| | | gaactgcgcgtgaaattcagccgcagcgcagatgctccagcctacaagcaggggcagaacca |
| | | gctctacaacgaactcaatcttggtcggagagaggagtacgacgtgctggacaagcggagag |
| | | gacgggacccagaaatgggcgggaagccgcgcagaaagaatccccaagagggcctgtacaac |
| | | gagctccaaaaggataagatggcagaagcctatagcgagattggtatgaaaggggaacgcag |
| | | aagaggcaaaggccacgacggactgtaccagggactcagcaccgccaccaaggacacctatg |
| | | acgctcttcacatgcaggccctgccgcctcgg |
| hzCAR123-13 | 1204 | MALPVTALLLPLALLLHAARPDVQLTQSPSFLSASVGDRVTITCRASKSISKDLAWYQQK |
| AA | | PGKAPKLLIYSGSTLQSGVPSRFSGSGSGTEFTLTISSLQPEDFATYYCQQHNKYPYTFG |
| | | GGTKVEIKGGGGSGGGGSGGGGSGGGGSQVQLVQSGSELKKPGASVKVSCKASGYTFTSY |
| | | WMNWVRQAPGQGLEWMGRIDPYDSETHYNQKFKDRFVFSVDKSVSTAYLQISSLKAEDTA |
| | | VYYCARGNWDDYWGQGTTVTVSSTTTPAPRPPTPAPTIASQPLSLRPEACRPAAGGAVHT |
| | | RGLDFACDIYIWAPLAGTCGVLLLSLVITLYCKRGRKKLLYIFKQPFMRPVQTTQEEDGC |
| | | SCRFPEEEEGGCELRVKFSRSADAPAYKQGQNQLYNELNLGRREEYDVLDKRRGRDPEMG |
| | | GKPRRKNPQEGLYNELQKDKMAEAYSEIGMKGERRRGKGHDGLYQGLSTATKDTYDALHM |
| | | QALPPR |
| hzCAR123-13 | 1205 | MALPVTALLLPLALLLHAARPDVQLTQSPSFLSASVGDRVTITCRASKSISKDLAWYQQK |
| scFv | | PGKAPKLLIYSGSTLQSGVPSRFSGSGSGTEFTLTISSLQPEDFATYYCQQHNKYPYTFG |
| | | GGTKVEIKGGGGSGGGGSGGGGSGGGGSQVQLVQSGSELKKPGASVKVSCKASGYTFTSY |
| | | WMNWVRQAPGQGLEWMGRIDPYDSETHYNQKFKDRFVFSVDKSVSTAYLQISSLKAEDTA |
| | | VYYCARGNWDDYWGQGTTVTVSS |
| hzCAR123-13 | 1206 | QVQLVQSGSELKKPGASVKVSCKASGYTFTSYWMNWVRQAPGQGLEWMGRIDPYDSETHYNQ |
| VH | | KFKDRFVFSVDKSVSTAYLQISSLKAEDTAVYYCARGNWDDYWGQGTTVTVSS |
| hzCAR123-13 | 1207 | DVQLTQSPSFLSASVGDRVTITCRASKSISKDLAWYQQKPGKAPKLLIYSGSTLQSGVPSRF |
| VL | | SGSGSGTEFTLTISSLQPEDFATYYCQQHNKYPYTFGGGTKVEIK |
| hzCAR123-14 | 1208 | ATGGCCCTCCCTGTCACCGCCCTGCTGCTTCCGCTGGCTCTTCTGCTCCACGCCGCTCGGCC |
| NT | | CGAAGTGGTGCTGACCCAGTCGCCCGCAACCCTCTCTCTGTCGCCGGGAGAACGCGCCACTC |
| | | TTTCCTGTCGGGCGTCCAAGAGCATCTCAAAGGACCTCGCCTGGTACCAGCAGAAGCCTGGT |
| | | CAAGCCCCGCGGCTGCTGATCTACTCCGGCTCCACGCTGCAATCAGGAATCCCAGCCAGATT |
| | | TTCCGGTTCGGGGTCGGGGACTGACTTCACCTTGACCATTAGCTCGCTGGAACCTGAGGACT |
| | | TCGCCGTGTATTACTGCCAGCAGCACAACAAGTACCCGTACACCTTCGGAGGCGGTACTAAG |
| | | GTCGAGATCAAGGGGGGTGGCGGTAGCGGAGGAGGGGGCTCCGGCGGCGGCGGCTCAGGGGG |
| | | CGGAGGAAGCCAAGTGCAGCTGGTGCAGTCAGGCAGCGAACTGAAGAAGCCCGGAGCCTCCG |
| | | TCAAAGTGTCCTGCAAAGCCTCGGGATACACCTTCACCTCCTACTGGATGAACTGGGTCCGC |
| | | CAGGCACCTGGACAGGGGCTGGAGTGGATGGGAAGGATCGATCCCTACGATTCCGAAACCCA |
| | | TTACAATCAGAAGTTCAAGGACCGGTTTGTGTTCTCCGTGGACAAGTCCGTGTCCACCGCCT |
| | | ACCTCCAAATTAGCAGCCTGAAGGCGGAGGATACAGCTGTCTACTACTGCGCTCGCGGAAAC |
| | | TGGGATGACTATTGGGGCCAGGGAACTACCGTGACTGTGTCCTCCACCACTACCCCAGCACC |
| | | GAGGCCACCCACCCCGGCTCCTACCATCGCCTCCCAGCCTCTGTCCCTGCGTCCGGAggcat |
| | | gtagacccgcagctggtggggccgtgcatacccggggtcttgacttcgcctgcgatatctac |
| | | atttgggcccctctggctggtacttgcggggtcctgctgctttcactcgtgatcactcttta |
| | | ctgtaagcgcggtcggaagaagctgctgtacatctttaagcaacccttcatgaggcctgtgc |
| | | agactactcaagaggaggacggctgttcatgccggttcccagaggaggaggaaggcggctgc |
| | | gaactgcgcgtgaaattcagccgcagcgcagatgctccagcctacaagcaggggcagaacca |
| | | gctctacaacgaactcaatcttggtcggagagaggagtacgacgtgctggacaagcggagag |
| | | gacgggacccagaaatgggcgggaagccgcgcagaaagaatccccaagagggcctgtacaac |
| | | gagctccaaaaggataagatggcagaagcctatagcgagattggtatgaaaggggaacgcag |
| | | aagaggcaaaggccacgacggactgtaccagggactcagcaccgccaccaaggacacctatg |
| | | acgctcttcacatgcaggccctgccgcctcgg |
| hzCAR123-14 | 1209 | MALPVTALLLPLALLLHAARPEVVLTQSPATLSLSPGERATLSCRASKSISKDLAWYQQK |
| AA | | PGQAPRLLIYSGSTLQSGIPARFSGSGSGTDFTLTISSLEPEDFAVYYCQQHNKYPYTFG |
| | | GGTKVEIKGGGGSGGGGSGGGGSGGGGSQVQLVQSGSELKKPGASVKVSCKASGYTFTSY |
| | | WMNWVRQAPGQGLEWMGRIDPYDSETHYNQKFKDRFVFSVDKSVSTAYLQISSLKAEDTA |
| | | VYYCARGNWDDYWGQGTTVTVSSTTTPAPRPPTPAPTIASQPLSLRPEACRPAAGGAVHT |
| | | RGLDFACDIYIWAPLAGTCGVLLLSLVITLYCKRGRKKLLYIFKQPFMRPVQTTQEEDGC |
| | | SCRFPEEEEGGCELRVKFSRSADAPAYKQGQNQLYNELNLGRREEYDVLDKRRGRDPEMG |
| | | GKPRRKNPQEGLYNELQKDKMAEAYSEIGMKGERRRGKGHDGLYQGLSTATKDTYDALHM |
| | | QALPPR |
| hzCAR123-14 | 1210 | MALPVTALLLPLALLLHAARPEVVLTQSPATLSLSPGERATLSCRASKSISKDLAWYQQK |
| scFv | | PGQAPRLLIYSGSTLQSGIPARFSGSGSGTDFTLTISSLEPEDFAVYYCQQHNKYPYTFG |
| | | GGTKVEIKGGGGSGGGGSGGGGSGGGGSQVQLVQSGSELKKPGASVKVSCKASGYTFTSY |
| | | WMNWVRQAPGQGLEWMGRIDPYDSETHYNQKFKDRFVFSVDKSVSTAYLQISSLKAEDTA |
| | | VYYCARGNWDDYWGQGTTVTVSS |
| hzCAR123-14 | 1211 | QVQLVQSGSELKKPGASVKVSCKASGYTFTSYWMNWVRQAPGQGLEWMGRIDPYDSETHYNQ |
| VH | | KFKDRFVFSVDKSVSTAYLQISSLKAEDTAVYYCARGNWDDYWGQGTTVTVSS |
| hzCAR123-14 | 1212 | EVVLTQSPATLSLSPGERATLSCRASKSISKDLAWYQQKPGQAPRLLIYSGSTLQSGIPARF |
| VL | | SGSGSGTDFTLTISSLEPEDFAVYYCQQHNKYPYTFGGGTKVEIK |
| hzCAR123-15 | 1213 | ATGGCCCTCCCTGTCACCGCCCTGCTGCTTCCGCTGGCTCTTCTGCTCCACGCCGCTCGGCC |
| NT | | CGACGTCGTGATGACCCAGTCACCGGCATTCCTGTCCGTGACTCCCGGAGAAAAGGTCACGA |
| | | TTACTTGCCGGGCGTCCAAGAGCATCTCCAAGGACCTCGCCTGGTACCAACAGAAGCCGGAC |
| | | CAGGCCCCTAAGCTGTTGATCTACTCGGGGTCCACCCTTCAATCGGGAGTGCCATCGCGGTT |
| | | TAGCGGTTCGGGTTCTGGGACCGACTTCACTTTCACCATCTCCTCACTGGAAGCCGAGGATG |
| | | CCGCCACTTACTACTGTCAGCAGCACAACAAGTATCCGTACACCTTCGGAGGCGGTACCAAA |
| | | GTGGAGATCAAGGGGGGTGGCGGTAGCGGAGGAGGGGGCTCCGGCGGCGGCGGCTCAGGGGG |
| | | CGGAGGAAGCCAAGTGCAGCTGGTGCAGTCAGGCAGCGAACTGAAGAAGCCCGGAGCCTCCG |
| | | TCAAAGTGTCCTGCAAAGCCTCGGGATACACCTTCACCTCCTACTGGATGAACTGGGTCCGC |
| | | CAGGCACCTGGACAGGGGCTGGAGTGGATGGGAAGGATCGATCCCTACGATTCCGAAACCCA |
| | | TTACAATCAGAAGTTCAAGGACCGGTTTGTGTTCTCCGTGGACAAGTCCGTGTCCACCGCCT |
| | | ACCTCCAAATTAGCAGCCTGAAGGCGGAGGATACAGCTGTCTACTACTGCGCTCGCGGAAAC |
| | | TGGGATGACTATTGGGGCCAGGGAACTACCGTGACTGTGTCCTCCACCACTACCCCAGCACC |
| | | GAGGCCACCCACCCCGGCTCCTACCATCGCCTCCCAGCCTCTGTCCCTGCGTCCGGAggcat |
| | | gtagacccgcagctggtggggccgtgcatacccggggtcttgacttcgcctgcgatatctac |
| | | atttgggcccctctggctggtacttgcggggtcctgctgctttcactcgtgatcactcttta |
| | | ctgtaagcgcggtcggaagaagctgctgtacatctttaagcaacccttcatgaggcctgtgc |
| | | agactactcaagaggaggacggctgttcatgccggttcccagaggaggaggaaggcggctgc |
| | | gaactgcgcgtgaaattcagccgcagcgcagatgctccagcctacaagcaggggcagaacca |
| | | gctctacaacgaactcaatcttggtcggagagaggagtacgacgtgctggacaagcggagag |
| | | gacgggacccagaaatgggcgggaagccgcgcagaaagaatccccaagagggcctgtacaac |
| | | gagctccaaaaggataagatggcagaagcctatagcgagattggtatgaaaggggaacgcag |
| | | aagaggcaaaggccacgacggactgtaccagggactcagcaccgccaccaaggacacctatg |
| | | acgctcttcacatgcaggccctgccgcctcgg |
| hzCAR123-15 | 1214 | MALPVTALLLPLALLLHAARPDVVMTQSPAFLSVTPGEKVTITCRASKSISKDLAWYQQK |
| AA | | PDQAPKLLIYSGSTLQSGVPSRFSGSGSGTDFTFTISSLEAEDAATYYCQQHNKYPYTFG |
| | | GGTKVEIKGGGGSGGGGSGGGGSGGGGSQVQLVQSGSELKKPGASVKVSCKASGYTFTSY |
| | | WMNWVRQAPGQGLEWMGRIDPYDSETHYNQKFKDRFVFSVDKSVSTAYLQISSLKAEDTA |
| | | VYYCARGNWDDYWGQGTTVTVSSTTTPAPRPPTPAPTIASQPLSLRPEACRPAAGGAVHT |
| | | RGLDFACDIYIWAPLAGTCGVLLLSLVITLYCKRGRKKLLYIFKQPFMRPVQTTQEEDGC |
| | | SCRFPEEEEGGCELRVKFSRSADAPAYKQGQNQLYNELNLGRREEYDVLDKRRGRDPEMG |
| | | GKPRRKNPQEGLYNELQKDKMAEAYSEIGMKGERRRGKGHDGLYQGLSTATKDTYDALHM |
| | | QALPPR |
| hzCAR123-15 | 1215 | MALPVTALLLPLALLLHAARPDVVMTQSPAFLSVTPGEKVTITCRASKSISKDLAWYQQK |
| scFv | | PDQAPKLLIYSGSTLQSGVPSRFSGSGSGTDFTFTISSLEAEDAATYYCQQHNKYPYTFG |
| | | GGTKVEIKGGGGSGGGGSGGGGSGGGGSQVQLVQSGSELKKPGASVKVSCKASGYTFTSY |
| | | WMNWVRQAPGQGLEWMGRIDPYDSETHYNQKFKDRFVFSVDKSVSTAYLQISSLKAEDTA |
| | | VYYCARGNWDDYWGQGTTVTVSS |
| hzCAR123-15 | 1216 | QVQLVQSGSELKKPGASVKVSCKASGYTFTSYWMNWVRQAPGQGLEWMGRIDPYDSETHYNQ |
| VH | | KFKDRFVFSVDKSVSTAYLQISSLKAEDTAVYYCARGNWDDYWGQGTTVTVSS |
| hzCAR123-15 | 1217 | DVVMTQSPAFLSVTPGEKVTITCRASKSISKDLAWYQQKPDQAPKLLIYSGSTLQSGVPSRF |
| VL | | SGSGSGTDFTFTISSLEAEDAATYYCQQHNKYPYTFGGGTKVEIK |
| hzCAR123-16 | 1218 | ATGGCCCTCCCTGTCACCGCCCTGCTGCTTCCGCTGGCTCTTCTGCTCCACGCCGCTCGGCC |
| NT | | CGACGTGGTCATGACTCAGTCCCCGGACTCACTCGCGGTGTCGCTTGGAGAGAGAGCGACCA |
| | | TCAACTGTCGGGCCTCAAAGAGCATCAGCAAGGACCTGGCCTGGTACCAGCAGAAGCCGGGA |
| | | CAGCCGCCAAAGCTGCTGATCTACTCCGGGTCCACCTTGCAATCTGGTGTCCCTGACCGGTT |
| | | CTCCGGTTCCGGGTCGGGTACCGACTTCACGCTCACTATTTCGTCGCTGCAAGCCGAAGATG |
| | | TGGCCGTGTACTATTGCCAACAGCACAACAAGTACCCCTACACTTTTGGCGGAGGCACCAAG |
| | | GTGGAAATCAAGGGGGGTGGCGGTAGCGGAGGAGGGGGCTCCGGCGGCGGCGGCTCAGGGGG |
| | | CGGAGGAAGCCAAGTGCAGCTGGTGCAGTCAGGCAGCGAACTGAAGAAGCCCGGAGCCTCCG |
| | | TCAAAGTGTCCTGCAAAGCCTCGGGATACACCTTCACCTCCTACTGGATGAACTGGGTCCGC |
| | | CAGGCACCTGGACAGGGGCTGGAGTGGATGGGAAGGATCGATCCCTACGATTCCGAAACCCA |
| | | TTACAATCAGAAGTTCAAGGACCGGTTTGTGTTCTCCGTGGACAAGTCCGTGTCCACCGCCT |
| | | ACCTCCAAATTAGCAGCCTGAAGGCGGAGGATACAGCTGTCTACTACTGCGCTCGCGGAAAC |
| | | TGGGATGACTATTGGGGCCAGGGAACTACCGTGACTGTGTCCTCCACCACTACCCCAGCACC |
| | | GAGGCCACCCACCCCGGCTCCTACCATCGCCTCCCAGCCTCTGTCCCTGCGTCCGGAggcat |
| | | gtagacccgcagctggtggggccgtgcatacccggggtcttgacttcgcctgcgatatctac |
| | | atttgggcccctctggctggtacttgcggggtcctgctgctttcactcgtgatcactcttta |
| | | ctgtaagcgcggtcggaagaagctgctgtacatctttaagcaacccttcatgaggcctgtgc |
| | | agactactcaagaggaggacggctgttcatgccggttcccagaggaggaggaaggcggctgc |
| | | gaactgcgcgtgaaattcagccgcagcgcagatgctccagcctacaagcaggggcagaacca |
| | | gctctacaacgaactcaatcttggtcggagagaggagtacgacgtgctggacaagcggagag |
| | | gacgggacccagaaatgggcgggaagccgcgcagaaagaatccccaagagggcctgtacaac |
| | | gagctccaaaaggataagatggcagaagcctatagcgagattggtatgaaaggggaacgcag |
| | | aagaggcaaaggccacgacggactgtaccagggactcagcaccgccaccaaggacacctatg |
| | | acgctcttcacatgcaggccctgccgcctcgg |
| hzCAR123-16 | 1219 | MALPVTALLLPLALLLHAARPDVVMTQSPDSLAVSLGERATINCRASKSISKDLAWYQQK |
| AA | | PGQPPKLLIYSGSTLQSGVPDRFSGSGSGTDFTLTISSLQAEDVAVYYCQQHNKYPYTFG |
| | | GGTKVEIKGGGGSGGGGSGGGGSGGGGSQVQLVQSGSELKKPGASVKVSCKASGYTFTSY |
| | | WMNWVRQAPGQGLEWMGRIDPYDSETHYNQKFKDRFVFSVDKSVSTAYLQISSLKAEDTA |
| | | VYYCARGNWDDYWGQGTTVTVSSTTTPAPRPPTPAPTIASQPLSLRPEACRPAAGGAVHT |
| | | RGLDFACDIYIWAPLAGTCGVLLLSLVITLYCKRGRKKLLYIFKQPFMRPVQTTQEEDGC |
| | | SCRFPEEEEGGCELRVKFSRSADAPAYKQGQNQLYNELNLGRREEYDVLDKRRGRDPEMG |
| | | GKPRRKNPQEGLYNELQKDKMAEAYSEIGMKGERRRGKGHDGLYQGLSTATKDTYDALHM |
| | | QALPPR |
| hzCAR123-16 | 1220 | MALPVTALLLPLALLLHAARPDVVMTQSPDSLAVSLGERATINCRASKSISKDLAWYQQK |
| scFv | | PGQPPKLLIYSGSTLQSGVPDRFSGSGSGTDFTLTISSLQAEDVAVYYCQQHNKYPYTFG |
| | | GGTKVEIKGGGGSGGGGSGGGGSGGGGSQVQLVQSGSELKKPGASVKVSCKASGYTFTSY |
| | | WMNWVRQAPGQGLEWMGRIDPYDSETHYNQKFKDRFVFSVDKSVSTAYLQISSLKAEDTA |
| | | VYYCARGNWDDYWGQGTTVTVSS |
| hzCAR123-16 | 1221 | QVQLVQSGSELKKPGASVKVSCKASGYTFTSYWMNWVRQAPGQGLEWMGRIDPYDSETHYNQ |
| VH | | KFKDRFVFSVDKSVSTAYLQISSLKAEDTAVYYCARGNWDDYWGQGTTVTVSS |
| hzCAR123-16 | 1222 | DVVMTQSPDSLAVSLGERATINCRASKSISKDLAWYQQKPGQPPKLLIYSGSTLQSGVPDRF |
| VL | | SGSGSGTDFTLTISSLQAEDVAVYYCQQHNKYPYTFGGGTKVEIK |
| hzCAR123-17 | 1223 | ATGGCCCTCCCTGTCACCGCCCTGCTGCTTCCGCTGGCTCTTCTGCTCCACGCCGCTCGGCC |
| NT | | CGAGGTGCAGCTGGTGCAGAGCGGAGCCGAGGTCAAGAAGCCTGGAGAATCCCTGAGGATCA |
| | | GCTGCAAAGGCAGCGGGTATACCTTCACCTCCTACTGGATGAATTGGGTCCGCCAGATGCCC |
| | | GGAAAAGGCCTGGAGTGGATGGGACGGATTGACCCCTACGACTCGGAAACCCATTACAACCA |
| | | GAAGTTCAAGGATCACGTGACCATCTCCGTGGACAAGTCCATTTCCACTGCGTACCTCCAGT |
| | | GGTCAAGCCTGAAGGCCTCCGACACTGCTATGTACTACTGCGCACGCGGAAACTGGGATGAT |
| | | TACTGGGGACAGGGAACAACCGTGACTGTGTCCTCCGGGGGTGGCGGTAGCGGAGGAGGGGG |
| | | CTCCGGCGGCGGCGGCTCAGGGGGCGGAGGAAGCGACGTGCAGCTCACCCAGTCGCCCTCAT |
| | | TTCTGTCGGCCTCAGTGGGAGACAGAGTGACCATTACTTGTCGGGCCTCCAAGAGCATCTCC |
| | | AAGGACCTGGCCTGGTATCAGCAGAAGCCAGGAAAGGCGCCTAAGTTGCTCATCTACTCGGG |
| | | GTCGACCCTGCAATCTGGCGTGCCGTCCCGGTTCTCCGGTTCGGGAAGCGGTACCGAATTCA |
| | | CCCTTACTATCTCCTCCCTGCAACCGGAGGACTTCGCCACCTACTACTGCCAACAGCACAAC |
| | | AAGTACCCGTACACTTTCGGGGGTGGCACGAAGGTCGAAATCAAGACCACTACCCCAGCACC |
| | | GAGGCCACCCACCCCGGCTCCTACCATCGCCTCCCAGCCTCTGTCCCTGCGTCCGGAggcat |
| | | gtagacccgcagctggtggggccgtgcatacccggggtcttgacttcgcctgcgatatctac |
| | | atttgggcccctctggctggtacttgcggggtcctgctgctttcactcgtgatcactcttta |
| | | ctgtaagcgcggtcggaagaagctgctgtacatctttaagcaacccttcatgaggcctgtgc |
| | | agactactcaagaggaggacggctgttcatgccggttcccagaggaggaggaaggcggctgc |
| | | gaactgcgcgtgaaattcagccgcagcgcagatgctccagcctacaagcaggggcagaacca |
| | | gctctacaacgaactcaatcttggtcggagagaggagtacgacgtgctggacaagcggagag |
| | | gacgggacccagaaatgggcgggaagccgcgcagaaagaatccccaagagggcctgtacaac |
| | | gagctccaaaaggataagatggcagaagcctatagcgagattggtatgaaaggggaacgcag |
| | | aagaggcaaaggccacgacggactgtaccagggactcagcaccgccaccaaggacacctatg |
| | | acgctcttcacatgcaggccctgccgcctcgg |
| hzCAR123-17 | 1224 | MALPVTALLLPLALLLHAARPEVQLVQSGAEVKKPGESLRISCKGSGYTFTSYWMNWVRQ |
| AA | | MPGKGLEWMGRIDPYDSETHYNQKFKDHVTISVDKSISTAYLQWSSLKASDTAMYYCARG |
| | | NWDDYWGQGTTVTVSSGGGGSGGGGSGGGGSGGGGSDVQLTQSPSFLSASVGDRVTITCR |
| | | ASKSISKDLAWYQQKPGKAPKLLIYSGSTLQSGVPSRFSGSGSGTEFTLTISSLQPEDFA |
| | | TYYCQQHNKYPYTFGGGTKVEIKTTTPAPRPPTPAPTIASQPLSLRPEACRPAAGGAVHT |
| | | RGLDFACDIYIWAPLAGTCGVLLLSLVITLYCKRGRKKLLYIFKQPFMRPVQTTQEEDGC |
| | | SCRFPEEEEGGCELRVKFSRSADAPAYKQGQNQLYNELNLGRREEYDVLDKRRGRDPEMG |
| | | GKPRRKNPQEGLYNELQKDKMAEAYSEIGMKGERRRGKGHDGLYQGLSTATKDTYDALHM |
| | | QALPPR |
| hzCAR123-17 | 1225 | MALPVTALLLPLALLLHAARPEVQLVQSGAEVKKPGESLRISCKGSGYTFTSYWMNWVRQ |
| scFv | | MPGKGLEWMGRIDPYDSETHYNQKFKDHVTISVDKSISTAYLQWSSLKASDTAMYYCARG |
| | | NWDDYWGQGTTVTVSSGGGGSGGGGSGGGGSGGGGSDVQLTQSPSFLSASVGDRVTITCR |
| | | ASKSISKDLAWYQQKPGKAPKLLIYSGSTLQSGVPSRFSGSGSGTEFTLTISSLQPEDFA |
| | | TYYCQQHNKYPYTFGGGTKVEIK |
| hzCAR123-17 | 1226 | EVQLVQSGAEVKKPGESLRISCKGSGYTFTSYWMNWVRQMPGKGLEWMGRIDPYDSETHYNQ |
| VH | | KFKDHVTISVDKSISTAYLQWSSLKASDTAMYYCARGNWDDYWGQGTTVTVSS |
| hzCAR123-17 | 1227 | DVQLTQSPSFLSASVGDRVTITCRASKSISKDLAWYQQKPGKAPKLLIYSGSTLQSGVPSRF |
| VL | | SGSGSGTEFTLTISSLQPEDFATYYCQQHNKYPYTFGGGTKVEIK |
| hzCAR123-18 | 1228 | ATGGCCCTCCCTGTCACCGCCCTGCTGCTTCCGCTGGCTCTTCTGCTCCACGCCGCTCGGCC |
| NT | | CGAGGTGCAGCTGGTGCAGAGCGGAGCCGAGGTCAAGAAGCCTGGAGAATCCCTGAGGATCA |
| | | GCTGCAAAGGCAGCGGGTATACCTTCACCTCCTACTGGATGAATTGGGTCCGCCAGATGCCC |
| | | GGAAAAGGCCTGGAGTGGATGGGACGGATTGACCCCTACGACTCGGAAACCCATTACAACCA |
| | | GAAGTTCAAGGATCACGTGACCATCTCCGTGGACAAGTCCATTTCCACTGCGTACCTCCAGT |
| | | GGTCAAGCCTGAAGGCCTCCGACACTGCTATGTACTACTGCGCACGCGGAAACTGGGATGAT |
| | | TACTGGGGACAGGGAACAACCGTGACTGTGTCCTCCGGGGGTGGCGGTAGCGGAGGAGGGGG |
| | | CTCCGGCGGCGGCGGCTCAGGGGGCGGAGGAAGCGAAGTGGTGCTGACCCAGTCGCCCGCAA |
| | | CCCTCTCTCTGTCGCCGGGAGAACGCGCCACTCTTTCCTGTCGGGCGTCCAAGAGCATCTCA |
| | | AAGGACCTCGCCTGGTACCAGCAGAAGCCTGGTCAAGCCCCGCGGCTGCTGATCTACTCCGG |
| | | CTCCACGCTGCAATCAGGAATCCCAGCCAGATTTTCCGGTTCGGGGTCGGGGACTGACTTCA |
| | | CCTTGACCATTAGCTCGCTGGAACCTGAGGACTTCGCCGTGTATTACTGCCAGCAGCACAAC |
| | | AAGTACCCGTACACCTTCGGAGGCGGTACTAAGGTCGAGATCAAGACCACTACCCCAGCACC |
| | | GAGGCCACCCACCCCGGCTCCTACCATCGCCTCCCAGCCTCTGTCCCTGCGTCCGGAggcat |
| | | gtagacccgcagctggtggggccgtgcatacccggggtcttgacttcgcctgcgatatctac |
| | | atttgggcccctctggctggtacttgcggggtcctgctgctttcactcgtgatcactcttta |
| | | ctgtaagcgcggtcggaagaagctgctgtacatctttaagcaacccttcatgaggcctgtgc |
| | | agactactcaagaggaggacggctgttcatgccggttcccagaggaggaggaaggcggctgc |
| | | gaactgcgcgtgaaattcagccgcagcgcagatgctccagcctacaagcaggggcagaacca |
| | | gctctacaacgaactcaatcttggtcggagagaggagtacgacgtgctggacaagcggagag |
| | | gacgggacccagaaatgggcgggaagccgcgcagaaagaatccccaagagggcctgtacaac |
| | | gagctccaaaaggataagatggcagaagcctatagcgagattggtatgaaaggggaacgcag |
| | | aagaggcaaaggccacgacggactgtaccagggactcagcaccgccaccaaggacacctatg |
| | | acgctcttcacatgcaggccctgccgcctcgg |
| hzCAR123-18 | 1229 | MALPVTALLLPLALLLHAARPEVQLVQSGAEVKKPGESLRISCKGSGYTFTSYWMNWVRQ |
| AA | | MPGKGLEWMGRIDPYDSETHYNQKFKDHVTISVDKSISTAYLQWSSLKASDTAMYYCARG |
| | | NWDDYWGQGTTVTVSSGGGGSGGGGSGGGGSGGGGSEVVLTQSPATLSLSPGERATLSCR |
| | | ASKSISKDLAWYQQKPGQAPRLLIYSGSTLQSGIPARFSGSGSGTDFTLTISSLEPEDFA |
| | | VYYCQQHNKYPYTFGGGTKVEIKTTTPAPRPPTPAPTIASQPLSLRPEACRPAAGGAVHT |
| | | RGLDFACDIYIWAPLAGTCGVLLLSLVITLYCKRGRKKLLYIFKQPFMRPVQTTQEEDGC |
| | | SCRFPEEEEGGCELRVKFSRSADAPAYKQGQNQLYNELNLGRREEYDVLDKRRGRDPEMG |
| | | GKPRRKNPQEGLYNELQKDKMAEAYSEIGMKGERRRGKGHDGLYQGLSTATKDTYDALHM |
| | | QALPPR |
| hzCAR123-18 | 1230 | MALPVTALLLPLALLLHAARPEVQLVQSGAEVKKPGESLRISCKGSGYTFTSYWMNWVRQ |
| scFv | | MPGKGLEWMGRIDPYDSETHYNQKFKDHVTISVDKSISTAYLQWSSLKASDTAMYYCARG |
| | | NWDDYWGQGTTVTVSSGGGGSGGGGSGGGGSGGGGSEVVLTQSPATLSLSPGERATLSCR |
| | | ASKSISKDLAWYQQKPGQAPRLLIYSGSTLQSGIPARFSGSGSGTDFTLTISSLEPEDFA |
| | | VYYCQQHNKYPYTFGGGTKVEIK |
| hzCAR123-18 | 1231 | EVQLVQSGAEVKKPGESLRISCKGSGYTFTSYWMNWVRQMPGKGLEWMGRIDPYDSETHYNQ |
| VH | | KFKDHVTISVDKSISTAYLQWSSLKASDTAMYYCARGNWDDYWGQGTTVTVSS |
| hzCAR123-18 | 1232 | EVVLTQSPATLSLSPGERATLSCRASKSISKDLAWYQQKPGQAPRLLIYSGSTLQSGIPARF |
| VL | | SGSGSGTDFTLTISSLEPEDFAVYYCQQHNKYPYTFGGGTKVEIK |
| hzCAR123-19 | 1233 | ATGGCCCTCCCTGTCACCGCCCTGCTGCTTCCGCTGGCTCTTCTGCTCCACGCCGCTCGGCC |
| NT | | CGAGGTGCAGCTGGTGCAGAGCGGAGCCGAGGTCAAGAAGCCTGGAGAATCCCTGAGGATCA |
| | | GCTGCAAAGGCAGCGGGTATACCTTCACCTCCTACTGGATGAATTGGGTCCGCCAGATGCCC |
| | | GGAAAAGGCCTGGAGTGGATGGGACGGATTGACCCCTACGACTCGGAAACCCATTACAACCA |
| | | GAAGTTCAAGGATCACGTGACCATCTCCGTGGACAAGTCCATTTCCACTGCGTACCTCCAGT |
| | | GGTCAAGCCTGAAGGCCTCCGACACTGCTATGTACTACTGCGCACGCGGAAACTGGGATGAT |
| | | TACTGGGGACAGGGAACAACCGTGACTGTGTCCTCCGGGGGTGGCGGTAGCGGAGGAGGGGG |
| | | CTCCGGCGGCGGCGGCTCAGGGGGCGGAGGAAGCGACGTCGTGATGACCCAGTCACCGGCAT |
| | | TCCTGTCCGTGACTCCCGGAGAAAAGGTCACGATTACTTGCCGGGCGTCCAAGAGCATCTCC |
| | | AAGGACCTCGCCTGGTACCAACAGAAGCCGGACCAGGCCCCTAAGCTGTTGATCTACTCGGG |
| | | GTCCACCCTTCAATCGGGAGTGCCATCGCGGTTTAGCGGTTCGGGTTCTGGGACCGACTTCA |
| | | CTTTCACCATCTCCTCACTGGAAGCCGAGGATGCCGCCACTTACTACTGTCAGCAGCACAAC |
| | | AAGTATCCGTACACCTTCGGAGGCGGTACCAAAGTGGAGATCAAGACCACTACCCCAGCACC |
| | | GAGGCCACCCACCCCGGCTCCTACCATCGCCTCCCAGCCTCTGTCCCTGCGTCCGGAggcat |
| | | gtagacccgcagctggtggggccgtgcatacccggggtcttgacttcgcctgcgatatctac |
| | | atttgggcccctctggctggtacttgcggggtcctgctgctttcactcgtgatcactcttta |
| | | ctgtaagcgcggtcggaagaagctgctgtacatctttaagcaacccttcatgaggcctgtgc |
| | | agactactcaagaggaggacggctgttcatgccggttcccagaggaggaggaaggcggctgc |
| | | gaactgcgcgtgaaattcagccgcagcgcagatgctccagcctacaagcaggggcagaacca |
| | | gctctacaacgaactcaatcttggtcggagagaggagtacgacgtgctggacaagcggagag |
| | | gacgggacccagaaatgggcgggaagccgcgcagaaagaatccccaagagggcctgtacaac |
| | | gagctccaaaaggataagatggcagaagcctatagcgagattggtatgaaaggggaacgcag |
| | | aagaggcaaaggccacgacggactgtaccagggactcagcaccgccaccaaggacacctatg |
| | | acgctcttcacatgcaggccctgccgcctcgg |
| hzCAR123-19 | 1234 | MALPVTALLLPLALLLHAARPEVQLVQSGAEVKKPGESLRISCKGSGYTFTSYWMNWVRQ |
| AA | | MPGKGLEWMGRIDPYDSETHYNQKFKDHVTISVDKSISTAYLQWSSLKASDTAMYYCARG |
| | | NWDDYWGQGTTVTVSSGGGGSGGGGSGGGGSGGGGSDVVMTQSPAFLSVTPGEKVTITCR |
| | | ASKSISKDLAWYQQKPDQAPKLLIYSGSTLQSGVPSRFSGSGSGTDFTFTISSLEAEDAA |
| | | TYYCQQHNKYPYTFGGGTKVEIKTTTPAPRPPTPAPTIASQPLSLRPEACRPAAGGAVHT |
| | | RGLDFACDIYIWAPLAGTCGVLLLSLVITLYCKRGRKKLLYIFKQPFMRPVQTTQEEDGC |
| | | SCRFPEEEEGGCELRVKFSRSADAPAYKQGQNQLYNELNLGRREEYDVLDKRRGRDPEMG |
| | | GKPRRKNPQEGLYNELQKDKMAEAYSEIGMKGERRRGKGHDGLYQGLSTATKDTYDALHM |
| | | QALPPR |
| hzCAR123-19 | 1235 | MALPVTALLLPLALLLHAARPEVQLVQSGAEVKKPGESLRISCKGSGYTFTSYWMNWVRQ |
| scFv | | MPGKGLEWMGRIDPYDSETHYNQKFKDHVTISVDKSISTAYLQWSSLKASDTAMYYCARG |
| | | NWDDYWGQGTTVTVSSGGGGSGGGGSGGGGSGGGGSDVVMTQSPAFLSVTPGEKVTITCR |
| | | ASKSISKDLAWYQQKPDQAPKLLIYSGSTLQSGVPSRFSGSGSGTDFTFTISSLEAEDAA |
| | | TYYCQQHNKYPYTFGGGTKVEIK |
| hzCAR123-19 | 1236 | EVQLVQSGAEVKKPGESLRISCKGSGYTFTSYWMNWVRQMPGKGLEWMGRIDPYDSETHYNQ |
| VH | | KFKDHVTISVDKSISTAYLQWSSLKASDTAMYYCARGNWDDYWGQGTTVTVSS |
| hzCAR123-19 | 1237 | DVVMTQSPAFLSVTPGEKVTITCRASKSISKDLAWYQQKPDQAPKLLIYSGSTLQSGVPSRF |
| VL | | SGSGSGTDFTFTISSLEAEDAATYYCQQHNKYPYTFGGGTKVEIK |
| hzCAR123-20 | 1238 | ATGGCCCTCCCTGTCACCGCCCTGCTGCTTCCGCTGGCTCTTCTGCTCCACGCCGCTCGGCC |
| NT | | CGAGGTGCAGCTGGTGCAGAGCGGAGCCGAGGTCAAGAAGCCTGGAGAATCCCTGAGGATCA |
| | | GCTGCAAAGGCAGCGGGTATACCTTCACCTCCTACTGGATGAATTGGGTCCGCCAGATGCCC |
| | | GGAAAAGGCCTGGAGTGGATGGGACGGATTGACCCCTACGACTCGGAAACCCATTACAACCA |
| | | GAAGTTCAAGGATCACGTGACCATCTCCGTGGACAAGTCCATTTCCACTGCGTACCTCCAGT |
| | | GGTCAAGCCTGAAGGCCTCCGACACTGCTATGTACTACTGCGCACGCGGAAACTGGGATGAT |
| | | TACTGGGGACAGGGAACAACCGTGACTGTGTCCTCCGGGGGTGGCGGTAGCGGAGGAGGGGG |
| | | CTCCGGCGGCGGCGGCTCAGGGGGCGGAGGAAGCGACGTGGTCATGACTCAGTCCCCGGACT |
| | | CACTCGCGGTGTCGCTTGGAGAGAGAGCGACCATCAACTGTCGGGCCTCAAAGAGCATCAGC |
| | | AAGGACCTGGCCTGGTACCAGCAGAAGCCGGGACAGCCGCCAAAGCTGCTGATCTACTCCGG |
| | | GTCCACCTTGCAATCTGGTGTCCCTGACCGGTTCTCCGGTTCCGGGTCGGGTACCGACTTCA |
| | | CGCTCACTATTTCGTCGCTGCAAGCCGAAGATGTGGCCGTGTACTATTGCCAACAGCACAAC |
| | | AAGTACCCCTACACTTTTGGCGGAGGCACCAAGGTGGAAATCAAGACCACTACCCCAGCACC |
| | | GAGGCCACCCACCCCGGCTCCTACCATCGCCTCCCAGCCTCTGTCCCTGCGTCCGGAggcat |
| | | gtagacccgcagctggtggggccgtgcatacccggggtcttgacttcgcctgcgatatctac |
| | | atttgggcccctctggctggtacttgcggggtcctgctgctttcactcgtgatcactcttta |
| | | ctgtaagcgcggtcggaagaagctgctgtacatctttaagcaacccttcatgaggcctgtgc |
| | | agactactcaagaggaggacggctgttcatgccggttcccagaggaggaggaaggcggctgc |
| | | gaactgcgcgtgaaattcagccgcagcgcagatgctccagcctacaagcaggggcagaacca |
| | | gctctacaacgaactcaatcttggtcggagagaggagtacgacgtgctggacaagcggagag |
| | | gacgggacccagaaatgggcgggaagccgcgcagaaagaatccccaagagggcctgtacaac |
| | | gagctccaaaaggataagatggcagaagcctatagcgagattggtatgaaaggggaacgcag |
| | | aagaggcaaaggccacgacggactgtaccagggactcagcaccgccaccaaggacacctatg |
| | | acgctcttcacatgcaggccctgccgcctcgg |
| hzCAR123-20 | 1239 | MALPVTALLLPLALLLHAARPEVQLVQSGAEVKKPGESLRISCKGSGYTFTSYWMNWVRQ |
| AA | | MPGKGLEWMGRIDPYDSETHYNQKFKDHVTISVDKSISTAYLQWSSLKASDTAMYYCARG |
| | | NWDDYWGQGTTVTVSSGGGGSGGGGSGGGGSGGGGSDVVMTQSPDSLAVSLGERATINCR |
| | | ASKSISKDLAWYQQKPGQPPKLLIYSGSTLQSGVPDRFSGSGSGTDFTLTISSLQAEDVA |
| | | VYYCQQHNKYPYTFGGGTKVEIKTTTPAPRPPTPAPTIASQPLSLRPEACRPAAGGAVHT |
| | | RGLDFACDIYIWAPLAGTCGVLLLSLVITLYCKRGRKKLLYIFKQPFMRPVQTTQEEDGC |
| | | SCRFPEEEEGGCELRVKFSRSADAPAYKQGQNQLYNELNLGRREEYDVLDKRRGRDPEMG |
| | | GKPRRKNPQEGLYNELQKDKMAEAYSEIGMKGERRRGKGHDGLYQGLSTATKDTYDALHM |
| | | QALPPR |
| hzCAR123-20 | 1240 | MALPVTALLLPLALLLHAARPEVQLVQSGAEVKKPGESLRISCKGSGYTFTSYWMNWVRQ |
| scFv | | MPGKGLEWMGRIDPYDSETHYNQKFKDHVTISVDKSISTAYLQWSSLKASDTAMYYCARG |
| | | NWDDYWGQGTTVTVSSGGGGSGGGGSGGGGSGGGGSDVVMTQSPDSLAVSLGERATINCR |
| | | ASKSISKDLAWYQQKPGQPPKLLIYSGSTLQSGVPDRFSGSGSGTDFTLTISSLQAEDVA |
| | | VYYCQQHNKYPYTFGGGTKVEIK |
| hzCAR123-20 | 1241 | EVQLVQSGAEVKKPGESLRISCKGSGYTFTSYWMNWVRQMPGKGLEWMGRIDPYDSETHYNQ |
| VH | | KFKDHVTISVDKSISTAYLQWSSLKASDTAMYYCARGNWDDYWGQGTTVTVSS |
| hzCAR123-20 | 1242 | DVVMTQSPDSLAVSLGERATINCRASKSISKDLAWYQQKPGQPPKLLIYSGSTLQSGVPDRF |
| VL | | SGSGSGTDFTLTISSLQAEDVAVYYCQQHNKYPYTFGGGTKVEIK |
| hzCAR123-21 | 1243 | ATGGCCCTCCCTGTCACCGCCCTGCTGCTTCCGCTGGCTCTTCTGCTCCACGCCGCTCGGCC |
| NT | | CGACGTGCAGCTCACCCAGTCGCCCTCATTTCTGTCGGCCTCAGTGGGAGACAGAGTGACCA |
| | | TTACTTGTCGGGCCTCCAAGAGCATCTCCAAGGACCTGGCCTGGTATCAGCAGAAGCCAGGA |
| | | AAGGCGCCTAAGTTGCTCATCTACTCGGGGTCGACCCTGCAATCTGGCGTGCCGTCCCGGTT |
| | | CTCCGGTTCGGGAAGCGGTACCGAATTCACCCTTACTATCTCCTCCCTGCAACCGGAGGACT |
| | | TCGCCACCTACTACTGCCAACAGCACAACAAGTACCCGTACACTTTCGGGGGTGGCACGAAG |
| | | GTCGAAATCAAGGGGGGTGGCGGTAGCGGAGGAGGGGGCTCCGGCGGCGGCGGCTCAGGGGG |
| | | CGGAGGAAGCGAGGTGCAGCTGGTGCAGAGCGGAGCCGAGGTCAAGAAGCCTGGAGAATCCC |
| | | TGAGGATCAGCTGCAAAGGCAGCGGGTATACCTTCACCTCCTACTGGATGAATTGGGTCCGC |
| | | CAGATGCCCGGAAAAGGCCTGGAGTGGATGGGACGGATTGACCCCTACGACTCGGAAACCCA |
| | | TTACAACCAGAAGTTCAAGGATCACGTGACCATCTCCGTGGACAAGTCCATTTCCACTGCGT |
| | | ACCTCCAGTGGTCAAGCCTGAAGGCCTCCGACACTGCTATGTACTACTGCGCACGCGGAAAC |
| | | TGGGATGATTACTGGGGACAGGGAACAACCGTGACTGTGTCCTCCACCACTACCCCAGCACC |
| | | GAGGCCACCCACCCCGGCTCCTACCATCGCCTCCCAGCCTCTGTCCCTGCGTCCGGAggcat |
| | | gtagacccgcagctggtggggccgtgcatacccggggtcttgacttcgcctgcgatatctac |
| | | atttgggcccctctggctggtacttgcggggtcctgctgctttcactcgtgatcactcttta |
| | | ctgtaagcgcggtcggaagaagctgctgtacatctttaagcaacccttcatgaggcctgtgc |
| | | agactactcaagaggaggacggctgttcatgccggttcccagaggaggaggaaggcggctgc |
| | | gaactgcgcgtgaaattcagccgcagcgcagatgctccagcctacaagcaggggcagaacca |
| | | gctctacaacgaactcaatcttggtcggagagaggagtacgacgtgctggacaagcggagag |
| | | gacgggacccagaaatgggcgggaagccgcgcagaaagaatccccaagagggcctgtacaac |
| | | gagctccaaaaggataagatggcagaagcctatagcgagattggtatgaaaggggaacgcag |
| | | aagaggcaaaggccacgacggactgtaccagggactcagcaccgccaccaaggacacctatg |
| | | acgctcttcacatgcaggccctgccgcctcgg |
| hzCAR123-21 | 1244 | MALPVTALLLPLALLLHAARPDVQLTQSPSFLSASVGDRVTITCRASKSISKDLAWYQQK |
| AA | | PGKAPKLLIYSGSTLQSGVPSRFSGSGSGTEFTLTISSLQPEDFATYYCQQHNKYPYTFG |
| | | GGTKVEIKGGGGSGGGGSGGGGSGGGGSEVQLVQSGAEVKKPGESLRISCKGSGYTFTSY |
| | | WMNWVRQMPGKGLEWMGRIDPYDSETHYNQKFKDHVTISVDKSISTAYLQWSSLKASDTA |
| | | MYYCARGNWDDYWGQGTTVTVSSTTTPAPRPPTPAPTIASQPLSLRPEACRPAAGGAVHT |
| | | RGLDFACDIYIWAPLAGTCGVLLLSLVITLYCKRGRKKLLYIFKQPFMRPVQTTQEEDGC |
| | | SCRFPEEEEGGCELRVKFSRSADAPAYKQGQNQLYNELNLGRREEYDVLDKRRGRDPEMG |
| | | GKPRRKNPQEGLYNELQKDKMAEAYSEIGMKGERRRGKGHDGLYQGLSTATKDTYDALHM |
| | | QALPPR |
| hzCAR123-21 | 1245 | MALPVTALLLPLALLLHAARPDVQLTQSPSFLSASVGDRVTITCRASKSISKDLAWYQQK |
| scFv | | PGKAPKLLIYSGSTLQSGVPSRFSGSGSGTEFTLTISSLQPEDFATYYCQQHNKYPYTFG |
| | | GGTKVEIKGGGGSGGGGSGGGGSGGGGSEVQLVQSGAEVKKPGESLRISCKGSGYTFTSY |
| | | WMNWVRQMPGKGLEWMGRIDPYDSETHYNQKFKDHVTISVDKSISTAYLQWSSLKASDTA |
| | | MYYCARGNWDDYWGQGTTVTVSS |
| hzCAR123-21 | 1246 | EVQLVQSGAEVKKPGESLRISCKGSGYTFTSYWMNWVRQMPGKGLEWMGRIDPYDSETHYNQ |
| VH | | KFKDHVTISVDKSISTAYLQWSSLKASDTAMYYCARGNWDDYWGQGTTVTVSS |
| hzCAR123-21 | 1247 | DVQLTQSPSFLSASVGDRVTITCRASKSISKDLAWYQQKPGKAPKLLIYSGSTLQSGVPSRF |
| VL | | SGSGSGTEFTLTISSLQPEDFATYYCQQHNKYPYTFGGGTKVEIK |
| hzCAR123-22 | 1248 | ATGGCCCTCCCTGTCACCGCCCTGCTGCTTCCGCTGGCTCTTCTGCTCCACGCCGCTCGGCC |
| NT | | CGAAGTGGTGCTGACCCAGTCGCCCGCAACCCTCTCTCTGTCGCCGGGAGAACGCGCCACTC |
| | | TTTCCTGTCGGGCGTCCAAGAGCATCTCAAAGGACCTCGCCTGGTACCAGCAGAAGCCTGGT |
| | | CAAGCCCCGCGGCTGCTGATCTACTCCGGCTCCACGCTGCAATCAGGAATCCCAGCCAGATT |
| | | TTCCGGTTCGGGGTCGGGGACTGACTTCACCTTGACCATTAGCTCGCTGGAACCTGAGGACT |
| | | TCGCCGTGTATTACTGCCAGCAGCACAACAAGTACCCGTACACCTTCGGAGGCGGTACTAAG |
| | | GTCGAGATCAAGGGGGGTGGCGGTAGCGGAGGAGGGGGCTCCGGCGGCGGCGGCTCAGGGGG |
| | | CGGAGGAAGCGAGGTGCAGCTGGTGCAGAGCGGAGCCGAGGTCAAGAAGCCTGGAGAATCCC |
| | | TGAGGATCAGCTGCAAAGGCAGCGGGTATACCTTCACCTCCTACTGGATGAATTGGGTCCGC |
| | | CAGATGCCCGGAAAAGGCCTGGAGTGGATGGGACGGATTGACCCCTACGACTCGGAAACCCA |
| | | TTACAACCAGAAGTTCAAGGATCACGTGACCATCTCCGTGGACAAGTCCATTTCCACTGCGT |
| | | ACCTCCAGTGGTCAAGCCTGAAGGCCTCCGACACTGCTATGTACTACTGCGCACGCGGAAAC |
| | | TGGGATGATTACTGGGGACAGGGAACAACCGTGACTGTGTCCTCCACCACTACCCCAGCACC |
| | | GAGGCCACCCACCCCGGCTCCTACCATCGCCTCCCAGCCTCTGTCCCTGCGTCCGGAggcat |
| | | gtagacccgcagctggtggggccgtgcatacccggggtcttgacttcgcctgcgatatctac |
| | | atttgggcccctctggctggtacttgcggggtcctgctgctttcactcgtgatcactcttta |
| | | ctgtaagcgcggtcggaagaagctgctgtacatctttaagcaacccttcatgaggcctgtgc |
| | | agactactcaagaggaggacggctgttcatgccggttcccagaggaggaggaaggcggctgc |
| | | gaactgcgcgtgaaattcagccgcagcgcagatgctccagcctacaagcaggggcagaacca |
| | | gctctacaacgaactcaatcttggtcggagagaggagtacgacgtgctggacaagcggagag |
| | | gacgggacccagaaatgggcgggaagccgcgcagaaagaatccccaagagggcctgtacaac |
| | | gagctccaaaaggataagatggcagaagcctatagcgagattggtatgaaaggggaacgcag |
| | | aagaggcaaaggccacgacggactgtaccagggactcagcaccgccaccaaggacacctatg |
| | | acgctcttcacatgcaggccctgccgcctcgg |
| hzCAR123-22 | 1249 | MALPVTALLLPLALLLHAARPEVVLTQSPATLSLSPGERATLSCRASKSISKDLAWYQQK |
| AA | | PGQAPRLLIYSGSTLQSGIPARFSGSGSGTDFTLTISSLEPEDFAVYYCQQHNKYPYTFG |
| | | GGTKVEIKGGGGSGGGGSGGGGSGGGGSEVQLVQSGAEVKKPGESLRISCKGSGYTFTSY |
| | | WMNWVRQMPGKGLEWMGRIDPYDSETHYNQKFKDHVTISVDKSISTAYLQWSSLKASDTA |
| | | MYYCARGNWDDYWGQGTTVTVSSTTTPAPRPPTPAPTIASQPLSLRPEACRPAAGGAVHT |
| | | RGLDFACDIYIWAPLAGTCGVLLLSLVITLYCKRGRKKLLYIFKQPFMRPVQTTQEEDGC |
| | | SCRFPEEEEGGCELRVKFSRSADAPAYKQGQNQLYNELNLGRREEYDVLDKRRGRDPEMG |
| | | GKPRRKNPQEGLYNELQKDKMAEAYSEIGMKGERRRGKGHDGLYQGLSTATKDTYDALHM |
| | | QALPPR |
| hzCAR123-22 | 1250 | MALPVTALLLPLALLLHAARPEVVLTQSPATLSLSPGERATLSCRASKSISKDLAWYQQK |
| scFv | | PGQAPRLLIYSGSTLQSGIPARFSGSGSGTDFTLTISSLEPEDFAVYYCQQHNKYPYTFG |
| | | GGTKVEIKGGGGSGGGGSGGGGSGGGGSEVQLVQSGAEVKKPGESLRISCKGSGYTFTSY |
| | | WMNWVRQMPGKGLEWMGRIDPYDSETHYNQKFKDHVTISVDKSISTAYLQWSSLKASDTA |
| | | MYYCARGNWDDYWGQGTTVTVSS |
| hzCAR123-22 | 1251 | EVQLVQSGAEVKKPGESLRISCKGSGYTFTSYWMNWVRQMPGKGLEWMGRIDPYDSETHYNQ |
| VH | | KFKDHVTISVDKSISTAYLQWSSLKASDTAMYYCARGNWDDYWGQGTTVTVSS |
| hzCAR123-22 | 1252 | EVVLTQSPATLSLSPGERATLSCRASKSISKDLAWYQQKPGQAPRLLIYSGSTLQSGIPARF |
| VL | | SGSGSGTDFTLTISSLEPEDFAVYYCQQHNKYPYTFGGGTKVEIK |
| hzCAR123-23 | 1253 | ATGGCCCTCCCTGTCACCGCCCTGCTGCTTCCGCTGGCTCTTCTGCTCCACGCCGCTCGGCC |
| NT | | CGACGTCGTGATGACCCAGTCACCGGCATTCCTGTCCGTGACTCCCGGAGAAAAGGTCACGA |
| | | TTACTTGCCGGGCGTCCAAGAGCATCTCCAAGGACCTCGCCTGGTACCAACAGAAGCCGGAC |
| | | CAGGCCCCTAAGCTGTTGATCTACTCGGGGTCCACCCTTCAATCGGGAGTGCCATCGCGGTT |
| | | TAGCGGTTCGGGTTCTGGGACCGACTTCACTTTCACCATCTCCTCACTGGAAGCCGAGGATG |
| | | CCGCCACTTACTACTGTCAGCAGCACAACAAGTATCCGTACACCTTCGGAGGCGGTACCAAA |
| | | GTGGAGATCAAGGGGGGTGGCGGTAGCGGAGGAGGGGGCTCCGGCGGCGGCGGCTCAGGGGG |
| | | CGGAGGAAGCGAGGTGCAGCTGGTGCAGAGCGGAGCCGAGGTCAAGAAGCCTGGAGAATCCC |
| | | TGAGGATCAGCTGCAAAGGCAGCGGGTATACCTTCACCTCCTACTGGATGAATTGGGTCCGC |
| | | CAGATGCCCGGAAAAGGCCTGGAGTGGATGGGACGGATTGACCCCTACGACTCGGAAACCCA |
| | | TTACAACCAGAAGTTCAAGGATCACGTGACCATCTCCGTGGACAAGTCCATTTCCACTGCGT |
| | | ACCTCCAGTGGTCAAGCCTGAAGGCCTCCGACACTGCTATGTACTACTGCGCACGCGGAAAC |
| | | TGGGATGATTACTGGGGACAGGGAACAACCGTGACTGTGTCCTCCACCACTACCCCAGCACC |
| | | GAGGCCACCCACCCCGGCTCCTACCATCGCCTCCCAGCCTCTGTCCCTGCGTCCGGAggcat |
| | | gtagacccgcagctggtggggccgtgcatacccggggtcttgacttcgcctgcgatatctac |
| | | atttgggcccctctggctggtacttgcggggtcctgctgctttcactcgtgatcactcttta |
| | | ctgtaagcgcggtcggaagaagctgctgtacatctttaagcaacccttcatgaggcctgtgc |
| | | agactactcaagaggaggacggctgttcatgccggttcccagaggaggaggaaggcggctgc |
| | | gaactgcgcgtgaaattcagccgcagcgcagatgctccagcctacaagcaggggcagaacca |
| | | gctctacaacgaactcaatcttggtcggagagaggagtacgacgtgctggacaagcggagag |
| | | gacgggacccagaaatgggcgggaagccgcgcagaaagaatccccaagagggcctgtacaac |
| | | gagctccaaaaggataagatggcagaagcctatagcgagattggtatgaaaggggaacgcag |
| | | aagaggcaaaggccacgacggactgtaccagggactcagcaccgccaccaaggacacctatg |
| | | acgctcttcacatgcaggccctgccgcctcgg |
| hzCAR123-23 | 1254 | MALPVTALLLPLALLLHAARPDVVMTQSPAFLSVTPGEKVTITCRASKSISKDLAWYQQK |
| AA | | PDQAPKLLIYSGSTLQSGVPSRFSGSGSGTDFTFTISSLEAEDAATYYCQQHNKYPYTFG |
| | | GGTKVEIKGGGGSGGGGSGGGGSGGGGSEVQLVQSGAEVKKPGESLRISCKGSGYTFTSY |
| | | WMNWVRQMPGKGLEWMGRIDPYDSETHYNQKFKDHVTISVDKSISTAYLQWSSLKASDTA |
| | | MYYCARGNWDDYWGQGTTVTVSSTTTPAPRPPTPAPTIASQPLSLRPEACRPAAGGAVHT |
| | | RGLDFACDIYIWAPLAGTCGVLLLSLVITLYCKRGRKKLLYIFKQPFMRPVQTTQEEDGC |
| | | SCRFPEEEEGGCELRVKFSRSADAPAYKQGQNQLYNELNLGRREEYDVLDKRRGRDPEMG |
| | | GKPRRKNPQEGLYNELQKDKMAEAYSEIGMKGERRRGKGHDGLYQGLSTATKDTYDALHM |
| | | QALPPR |
| hzCAR123-23 | 1255 | MALPVTALLLPLALLLHAARPDVVMTQSPAFLSVTPGEKVTITCRASKSISKDLAWYQQK |
| scFv | | PDQAPKLLIYSGSTLQSGVPSRFSGSGSGTDFTFTISSLEAEDAATYYCQQHNKYPYTFG |
| | | GGTKVEIKGGGGSGGGGSGGGGSGGGGSEVQLVQSGAEVKKPGESLRISCKGSGYTFTSY |
| | | WMNWVRQMPGKGLEWMGRIDPYDSETHYNQKFKDHVTISVDKSISTAYLQWSSLKASDTA |
| | | MYYCARGNWDDYWGQGTTVTVSS |
| hzCAR123-23 | 1256 | EVQLVQSGAEVKKPGESLRISCKGSGYTFTSYWMNWVRQMPGKGLEWMGRIDPYDSETHYNQ |
| VH | | KFKDHVTISVDKSISTAYLQWSSLKASDTAMYYCARGNWDDYWGQGTTVTVSS |
| hzCAR123-23 | 1257 | DVVMTQSPAFLSVTPGEKVTITCRASKSISKDLAWYQQKPDQAPKLLIYSGSTLQSGVPSRF |
| VL | | SGSGSGTDFTFTISSLEAEDAATYYCQQHNKYPYTFGGGTKVEIK |
| hzCAR123-24 | 1258 | ATGGCCCTCCCTGTCACCGCCCTGCTGCTTCCGCTGGCTCTTCTGCTCCACGCCGCTCGGCC |
| NT | | CGACGTGGTCATGACTCAGTCCCCGGACTCACTCGCGGTGTCGCTTGGAGAGAGAGCGACCA |
| | | TCAACTGTCGGGCCTCAAAGAGCATCAGCAAGGACCTGGCCTGGTACCAGCAGAAGCCGGGA |
| | | CAGCCGCCAAAGCTGCTGATCTACTCCGGGTCCACCTTGCAATCTGGTGTCCCTGACCGGTT |
| | | CTCCGGTTCCGGGTCGGGTACCGACTTCACGCTCACTATTTCGTCGCTGCAAGCCGAAGATG |
| | | TGGCCGTGTACTATTGCCAACAGCACAACAAGTACCCCTACACTTTTGGCGGAGGCACCAAG |
| | | GTGGAAATCAAGGGGGGTGGCGGTAGCGGAGGAGGGGGCTCCGGCGGCGGCGGCTCAGGGGG |
| | | CGGAGGAAGCGAGGTGCAGCTGGTGCAGAGCGGAGCCGAGGTCAAGAAGCCTGGAGAATCCC |
| | | TGAGGATCAGCTGCAAAGGCAGCGGGTATACCTTCACCTCCTACTGGATGAATTGGGTCCGC |
| | | CAGATGCCCGGAAAAGGCCTGGAGTGGATGGGACGGATTGACCCCTACGACTCGGAAACCCA |
| | | TTACAACCAGAAGTTCAAGGATCACGTGACCATCTCCGTGGACAAGTCCATTTCCACTGCGT |
| | | ACCTCCAGTGGTCAAGCCTGAAGGCCTCCGACACTGCTATGTACTACTGCGCACGCGGAAAC |
| | | TGGGATGATTACTGGGGACAGGGAACAACCGTGACTGTGTCCTCCACCACTACCCCAGCACC |
| | | GAGGCCACCCACCCCGGCTCCTACCATCGCCTCCCAGCCTCTGTCCCTGCGTCCGGAggcat |
| | | gtagacccgcagctggtggggccgtgcatacccggggtcttgacttcgcctgcgatatctac |
| | | atttgggcccctctggctggtacttgcggggtcctgctgctttcactcgtgatcactcttta |
| | | ctgtaagcgcggtcggaagaagctgctgtacatctttaagcaacccttcatgaggcctgtgc |
| | | agactactcaagaggaggacggctgttcatgccggttcccagaggaggaggaaggcggctgc |
| | | gaactgcgcgtgaaattcagccgcagcgcagatgctccagcctacaagcaggggcagaacca |
| | | gctctacaacgaactcaatcttggtcggagagaggagtacgacgtgctggacaagcggagag |
| | | gacgggacccagaaatgggcgggaagccgcgcagaaagaatccccaagagggcctgtacaac |
| | | gagctccaaaaggataagatggcagaagcctatagcgagattggtatgaaaggggaacgcag |
| | | aagaggcaaaggccacgacggactgtaccagggactcagcaccgccaccaaggacacctatg |
| | | acgctcttcacatgcaggccctgccgcctcgg |
| hzCAR123-24 | 1259 | MALPVTALLLPLALLLHAARPDVVMTQSPDSLAVSLGERATINCRASKSISKDLAWYQQK |
| AA | | PGQPPKLLIYSGSTLQSGVPDRFSGSGSGTDFTLTISSLQAEDVAVYYCQQHNKYPYTFG |
| | | GGTKVEIKGGGGSGGGGSGGGGSGGGGSEVQLVQSGAEVKKPGESLRISCKGSGYTFTSY |
| | | WMNWVRQMPGKGLEWMGRIDPYDSETHYNQKFKDHVTISVDKSISTAYLQWSSLKASDTA |
| | | MYYCARGNWDDYWGQGTTVTVSSTTTPAPRPPTPAPTIASQPLSLRPEACRPAAGGAVHT |
| | | RGLDFACDIYIWAPLAGTCGVLLLSLVITLYCKRGRKKLLYIFKQPFMRPVQTTQEEDGC |
| | | SCRFPEEEEGGCELRVKFSRSADAPAYKQGQNQLYNELNLGRREEYDVLDKRRGRDPEMG |
| | | GKPRRKNPQEGLYNELQKDKMAEAYSEIGMKGERRRGKGHDGLYQGLSTATKDTYDALHM |
| | | QALPPR |
| hzCAR123-24 | 1260 | MALPVTALLLPLALLLHAARPDVVMTQSPDSLAVSLGERATINCRASKSISKDLAWYQQK |
| scFv | | PGQPPKLLIYSGSTLQSGVPDRFSGSGSGTDFTLTISSLQAEDVAVYYCQQHNKYPYTFG |
| | | GGTKVEIKGGGGSGGGGSGGGGSGGGGSEVQLVQSGAEVKKPGESLRISCKGSGYTFTSY |
| | | WMNWVRQMPGKGLEWMGRIDPYDSETHYNQKFKDHVTISVDKSISTAYLQWSSLKASDTA |
| | | MYYCARGNWDDYWGQGTTVTVSS |
| hzCAR123-24 | 1261 | EVQLVQSGAEVKKPGESLRISCKGSGYTFTSYWMNWVRQMPGKGLEWMGRIDPYDSETHYNQ |
| VH | | KFKDHVTISVDKSISTAYLQWSSLKASDTAMYYCARGNWDDYWGQGTTVTVSS |
| hzCAR123-24 | 1262 | DVVMTQSPDSLAVSLGERATINCRASKSISKDLAWYQQKPGQPPKLLIYSGSTLQSGVPDRF |
| VL | | SGSGSGTDFTLTISSLQAEDVAVYYCQQHNKYPYTFGGGTKVEIK |
| hzCAR123-25 | 1263 | ATGGCCCTCCCTGTCACCGCCCTGCTGCTTCCGCTGGCTCTTCTGCTCCACGCCGCTCGGCC |
| NT | | CGAAGTGCAGCTCGTCGAGAGCGGAGGGGGACTGGTGCAGCCCGGAGGAAGCCTGAGGCTGT |
| | | CCTGCGCTGCCTCCGGCTACACCTTCACCTCCTACTGGATGAACTGGGTCAGACAGGCACCT |
| | | GGAAAGGGACTGGTCTGGGTGTCGCGCATTGACCCCTACGACTCCGAAACCCATTACAATCA |
| | | GAAATTCAAGGACCGCTTCACCATCTCCGTGGACAAAGCCAAGAGCACCGCGTACCTCCAAA |
| | | TGAACTCCCTGCGCGCTGAGGATACAGCAGTGTACTATTGCGCCCGGGGAAACTGGGATGAT |
| | | TACTGGGGCCAGGGAACTACTGTGACTGTGTCATCCGGGGGTGGCGGTAGCGGAGGAGGGGG |
| | | CTCCGGCGGCGGCGGCTCAGGGGGCGGAGGAAGCGACGTGCAGCTCACCCAGTCGCCCTCAT |
| | | TTCTGTCGGCCTCAGTGGGAGACAGAGTGACCATTACTTGTCGGGCCTCCAAGAGCATCTCC |
| | | AAGGACCTGGCCTGGTATCAGCAGAAGCCAGGAAAGGCGCCTAAGTTGCTCATCTACTCGGG |
| | | GTCGACCCTGCAATCTGGCGTGCCGTCCCGGTTCTCCGGTTCGGGAAGCGGTACCGAATTCA |
| | | CCCTTACTATCTCCTCCCTGCAACCGGAGGACTTCGCCACCTACTACTGCCAACAGCACAAC |
| | | AAGTACCCGTACACTTTCGGGGGTGGCACGAAGGTCGAAATCAAGACCACTACCCCAGCACC |
| | | GAGGCCACCCACCCCGGCTCCTACCATCGCCTCCCAGCCTCTGTCCCTGCGTCCGGAggcat |
| | | gtagacccgcagctggtggggccgtgcatacccggggtcttgacttcgcctgcgatatctac |
| | | atttgggcccctctggctggtacttgcggggtcctgctgctttcactcgtgatcactcttta |
| | | ctgtaagcgcggtcggaagaagctgctgtacatctttaagcaacccttcatgaggcctgtgc |
| | | agactactcaagaggaggacggctgttcatgccggttcccagaggaggaggaaggcggctgc |
| | | gaactgcgcgtgaaattcagccgcagcgcagatgctccagcctacaagcaggggcagaacca |
| | | gctctacaacgaactcaatcttggtcggagagaggagtacgacgtgctggacaagcggagag |
| | | gacgggacccagaaatgggcgggaagccgcgcagaaagaatccccaagagggcctgtacaac |
| | | gagctccaaaaggataagatggcagaagcctatagcgagattggtatgaaaggggaacgcag |
| | | aagaggcaaaggccacgacggactgtaccagggactcagcaccgccaccaaggacacctatg |
| | | acgctcttcacatgcaggccctgccgcctcgg |
| hzCAR123-25 | 1264 | MALPVTALLLPLALLLHAARPEVQLVESGGGLVQPGGSLRLSCAASGYTFTSYWMNWVRQ |
| AA | | APGKGLVWVSRIDPYDSETHYNQKFKDRFTISVDKAKSTAYLQMNSLRAEDTAVYYCARG |
| | | NWDDYWGQGTTVTVSSGGGGSGGGGSGGGGSGGGGSDVQLTQSPSFLSASVGDRVTITCR |
| | | ASKSISKDLAWYQQKPGKAPKLLIYSGSTLQSGVPSRFSGSGSGTEFTLTISSLQPEDFA |
| | | TYYCQQHNKYPYTFGGGTKVEIKTTTPAPRPPTPAPTIASQPLSLRPEACRPAAGGAVHT |
| | | RGLDFACDIYIWAPLAGTCGVLLLSLVITLYCKRGRKKLLYIFKQPFMRPVQTTQEEDGC |
| | | SCRFPEEEEGGCELRVKFSRSADAPAYKQGQNQLYNELNLGRREEYDVLDKRRGRDPEMG |
| | | GKPRRKNPQEGLYNELQKDKMAEAYSEIGMKGERRRGKGHDGLYQGLSTATKDTYDALHM |
| | | QALPPR |
| hzCAR123-25 | 1265 | MALPVTALLLPLALLLHAARPEVQLVESGGGLVQPGGSLRLSCAASGYTFTSYWMNWVRQ |
| scFv | | APGKGLVWVSRIDPYDSETHYNQKFKDRFTISVDKAKSTAYLQMNSLRAEDTAVYYCARG |
| | | NWDDYWGQGTTVTVSSGGGGSGGGGSGGGGSGGGGSDVQLTQSPSFLSASVGDRVTITCR |
| | | ASKSISKDLAWYQQKPGKAPKLLIYSGSTLQSGVPSRFSGSGSGTEFTLTISSLQPEDFA |
| | | TYYCQQHNKYPYTFGGGTKVEIK |
| hzCAR123-25 | 1266 | EVQLVESGGGLVQPGGSLRLSCAASGYTFTSYWMNWVRQAPGKGLVWVSRIDPYDSETHYNQ |
| VH | | KFKDRFTISVDKAKSTAYLQMNSLRAEDTAVYYCARGNWDDYWGQGTTVTVSS |
| hzCAR123-25 | 1267 | DVQLTQSPSFLSASVGDRVTITCRASKSISKDLAWYQQKPGKAPKLLIYSGSTLQSGVPSRF |
| VL | | SGSGSGTEFTLTISSLQPEDFATYYCQQHNKYPYTFGGGTKVEIK |
| hzCAR123-26 | 1268 | ATGGCCCTCCCTGTCACCGCCCTGCTGCTTCCGCTGGCTCTTCTGCTCCACGCCGCTCGGCC |
| NT | | CGAAGTGCAGCTCGTCGAGAGCGGAGGGGGACTGGTGCAGCCCGGAGGAAGCCTGAGGCTGT |
| | | CCTGCGCTGCCTCCGGCTACACCTTCACCTCCTACTGGATGAACTGGGTCAGACAGGCACCT |
| | | GGAAAGGGACTGGTCTGGGTGTCGCGCATTGACCCCTACGACTCCGAAACCCATTACAATCA |
| | | GAAATTCAAGGACCGCTTCACCATCTCCGTGGACAAAGCCAAGAGCACCGCGTACCTCCAAA |
| | | TGAACTCCCTGCGCGCTGAGGATACAGCAGTGTACTATTGCGCCCGGGGAAACTGGGATGAT |
| | | TACTGGGGCCAGGGAACTACTGTGACTGTGTCATCCGGGGGTGGCGGTAGCGGAGGAGGGGG |
| | | CTCCGGCGGCGGCGGCTCAGGGGGCGGAGGAAGCGAAGTGGTGCTGACCCAGTCGCCCGCAA |
| | | CCCTCTCTCTGTCGCCGGGAGAACGCGCCACTCTTTCCTGTCGGGCGTCCAAGAGCATCTCA |
| | | AAGGACCTCGCCTGGTACCAGCAGAAGCCTGGTCAAGCCCCGCGGCTGCTGATCTACTCCGG |
| | | CTCCACGCTGCAATCAGGAATCCCAGCCAGATTTTCCGGTTCGGGGTCGGGGACTGACTTCA |
| | | CCTTGACCATTAGCTCGCTGGAACCTGAGGACTTCGCCGTGTATTACTGCCAGCAGCACAAC |
| | | AAGTACCCGTACACCTTCGGAGGCGGTACTAAGGTCGAGATCAAGACCACTACCCCAGCACC |
| | | GAGGCCACCCACCCCGGCTCCTACCATCGCCTCCCAGCCTCTGTCCCTGCGTCCGGAggcat |
| | | gtagacccgcagctggtggggccgtgcatacccggggtcttgacttcgcctgcgatatctac |
| | | atttgggcccctctggctggtacttgcggggtcctgctgctttcactcgtgatcactcttta |
| | | ctgtaagcgcggtcggaagaagctgctgtacatctttaagcaacccttcatgaggcctgtgc |
| | | agactactcaagaggaggacggctgttcatgccggttcccagaggaggaggaaggcggctgc |
| | | gaactgcgcgtgaaattcagccgcagcgcagatgctccagcctacaagcaggggcagaacca |
| | | gctctacaacgaactcaatcttggtcggagagaggagtacgacgtgctggacaagcggagag |
| | | gacgggacccagaaatgggcgggaagccgcgcagaaagaatccccaagagggcctgtacaac |
| | | gagctccaaaaggataagatggcagaagcctatagcgagattggtatgaaaggggaacgcag |
| | | aagaggcaaaggccacgacggactgtaccagggactcagcaccgccaccaaggacacctatg |
| | | acgctcttcacatgcaggccctgccgcctcgg |
| hzCAR123-26 | 1269 | MALPVTALLLPLALLLHAARPEVQLVESGGGLVQPGGSLRLSCAASGYTFTSYWMNWVRQ |
| AA | | APGKGLVWVSRIDPYDSETHYNQKFKDRFTISVDKAKSTAYLQMNSLRAEDTAVYYCARG |
| | | NWDDYWGQGTTVTVSSGGGGSGGGGSGGGGSGGGGSEVVLTQSPATLSLSPGERATLSCR |
| | | ASKSISKDLAWYQQKPGQAPRLLIYSGSTLQSGIPARFSGSGSGTDFTLTISSLEPEDFA |
| | | VYYCQQHNKYPYTFGGGTKVEIKTTTPAPRPPTPAPTIASQPLSLRPEACRPAAGGAVHT |
| | | RGLDFACDIYIWAPLAGTCGVLLLSLVITLYCKRGRKKLLYIFKQPFMRPVQTTQEEDGC |
| | | SCRFPEEEEGGCELRVKFSRSADAPAYKQGQNQLYNELNLGRREEYDVLDKRRGRDPEMG |
| | | GKPRRKNPQEGLYNELQKDKMAEAYSEIGMKGERRRGKGHDGLYQGLSTATKDTYDALHM |
| | | QALPPR |
| hzCAR123-26 | 1270 | MALPVTALLLPLALLLHAARPEVQLVESGGGLVQPGGSLRLSCAASGYTFTSYWMNWVRQ |
| scFv | | APGKGLVWVSRIDPYDSETHYNQKFKDRFTISVDKAKSTAYLQMNSLRAEDTAVYYCARG |
| | | NWDDYWGQGTTVTVSSGGGGSGGGGSGGGGSGGGGSEVVLTQSPATLSLSPGERATLSCR |
| | | ASKSISKDLAWYQQKPGQAPRLLIYSGSTLQSGIPARFSGSGSGTDFTLTISSLEPEDFA |
| | | VYYCQQHNKYPYTFGGGTKVEIK |
| hzCAR123-26 | 1271 | EVQLVESGGGLVQPGGSLRLSCAASGYTFTSYWMNWVRQAPGKGLVWVSRIDPYDSETHYNQ |
| VH | | KFKDRFTISVDKAKSTAYLQMNSLRAEDTAVYYCARGNWDDYWGQGTTVTVSS |
| hzCAR123-26 | 1272 | EVVLTQSPATLSLSPGERATLSCRASKSISKDLAWYQQKPGQAPRLLIYSGSTLQSGIPARF |
| VL | | SGSGSGTDFTLTISSLEPEDFAVYYCQQHNKYPYTFGGGTKVEIK |
| hzCAR123-27 | 1273 | ATGGCCCTCCCTGTCACCGCCCTGCTGCTTCCGCTGGCTCTTCTGCTCCACGCCGCTCGGCC |
| NT | | CGAAGTGCAGCTCGTCGAGAGCGGAGGGGGACTGGTGCAGCCCGGAGGAAGCCTGAGGCTGT |
| | | CCTGCGCTGCCTCCGGCTACACCTTCACCTCCTACTGGATGAACTGGGTCAGACAGGCACCT |
| | | GGAAAGGGACTGGTCTGGGTGTCGCGCATTGACCCCTACGACTCCGAAACCCATTACAATCA |
| | | GAAATTCAAGGACCGCTTCACCATCTCCGTGGACAAAGCCAAGAGCACCGCGTACCTCCAAA |
| | | TGAACTCCCTGCGCGCTGAGGATACAGCAGTGTACTATTGCGCCCGGGGAAACTGGGATGAT |
| | | TACTGGGGCCAGGGAACTACTGTGACTGTGTCATCCGGGGGTGGCGGTAGCGGAGGAGGGGG |
| | | CTCCGGCGGCGGCGGCTCAGGGGGCGGAGGAAGCGACGTCGTGATGACCCAGTCACCGGCAT |
| | | TCCTGTCCGTGACTCCCGGAGAAAAGGTCACGATTACTTGCCGGGCGTCCAAGAGCATCTCC |
| | | AAGGACCTCGCCTGGTACCAACAGAAGCCGGACCAGGCCCCTAAGCTGTTGATCTACTCGGG |
| | | GTCCACCCTTCAATCGGGAGTGCCATCGCGGTTTAGCGGTTCGGGTTCTGGGACCGACTTCA |
| | | CTTTCACCATCTCCTCACTGGAAGCCGAGGATGCCGCCACTTACTACTGTCAGCAGCACAAC |
| | | AAGTATCCGTACACCTTCGGAGGCGGTACCAAAGTGGAGATCAAGACCACTACCCCAGCACC |
| | | GAGGCCACCCACCCCGGCTCCTACCATCGCCTCCCAGCCTCTGTCCCTGCGTCCGGAggcat |
| | | gtagacccgcagctggtggggccgtgcatacccggggtcttgacttcgcctgcgatatctac |
| | | atttgggcccctctggctggtacttgcggggtcctgctgctttcactcgtgatcactcttta |
| | | ctgtaagcgcggtcggaagaagctgctgtacatctttaagcaacccttcatgaggcctgtgc |
| | | agactactcaagaggaggacggctgttcatgccggttcccagaggaggaggaaggcggctgc |
| | | gaactgcgcgtgaaattcagccgcagcgcagatgctccagcctacaagcaggggcagaacca |
| | | gctctacaacgaactcaatcttggtcggagagaggagtacgacgtgctggacaagcggagag |
| | | gacgggacccagaaatgggcgggaagccgcgcagaaagaatccccaagagggcctgtacaac |
| | | gagctccaaaaggataagatggcagaagcctatagcgagattggtatgaaaggggaacgcag |
| | | aagaggcaaaggccacgacggactgtaccagggactcagcaccgccaccaaggacacctatg |
| | | acgctcttcacatgcaggccctgccgcctcgg |
| hzCAR123-27 | 1274 | MALPVTALLLPLALLLHAARPEVQLVESGGGLVQPGGSLRLSCAASGYTFTSYWMNWVRQ |
| AA | | APGKGLVWVSRIDPYDSETHYNQKFKDRFTISVDKAKSTAYLQMNSLRAEDTAVYYCARG |
| | | NWDDYWGQGTTVTVSSGGGGSGGGGSGGGGSGGGGSDVVMTQSPAFLSVTPGEKVTITCR |
| | | ASKSISKDLAWYQQKPDQAPKLLIYSGSTLQSGVPSRFSGSGSGTDFTFTISSLEAEDAA |
| | | TYYCQQHNKYPYTFGGGTKVEIKTTTPAPRPPTPAPTIASQPLSLRPEACRPAAGGAVHT |
| | | RGLDFACDIYIWAPLAGTCGVLLLSLVITLYCKRGRKKLLYIFKQPFMRPVQTTQEEDGC |
| | | SCRFPEEEEGGCELRVKFSRSADAPAYKQGQNQLYNELNLGRREEYDVLDKRRGRDPEMG |
| | | GKPRRKNPQEGLYNELQKDKMAEAYSEIGMKGERRRGKGHDGLYQGLSTATKDTYDALHM |
| | | QALPPR |
| hzCAR123-27 | 1275 | MALPVTALLLPLALLLHAARPEVQLVESGGGLVQPGGSLRLSCAASGYTFTSYWMNWVRQ |
| scFv | | APGKGLVWVSRIDPYDSETHYNQKFKDRFTISVDKAKSTAYLQMNSLRAEDTAVYYCARG |
| | | NWDDYWGQGTTVTVSSGGGGSGGGGSGGGGSGGGGSDVVMTQSPAFLSVTPGEKVTITCR |
| | | ASKSISKDLAWYQQKPDQAPKLLIYSGSTLQSGVPSRFSGSGSGTDFTFTISSLEAEDAA |
| | | TYYCQQHNKYPYTFGGGTKVEIK |
| hzCAR123-27 | 1276 | EVQLVESGGGLVQPGGSLRLSCAASGYTFTSYWMNWVRQAPGKGLVWVSRIDPYDSETHYNQ |
| VH | | KFKDRFTISVDKAKSTAYLQMNSLRAEDTAVYYCARGNWDDYWGQGTTVTVSS |
| hzCAR123-27 | 1277 | DVVMTQSPAFLSVTPGEKVTITCRASKSISKDLAWYQQKPDQAPKLLIYSGSTLQSGVPSRF |
| VL | | SGSGSGTDFTFTISSLEAEDAATYYCQQHNKYPYTFGGGTKVEIK |
| hzCAR123-28 | 1278 | ATGGCCCTCCCTGTCACCGCCCTGCTGCTTCCGCTGGCTCTTCTGCTCCACGCCGCTCGGCC |
| NT | | CGAAGTGCAGCTCGTCGAGAGCGGAGGGGGACTGGTGCAGCCCGGAGGAAGCCTGAGGCTGT |
| | | CCTGCGCTGCCTCCGGCTACACCTTCACCTCCTACTGGATGAACTGGGTCAGACAGGCACCT |
| | | GGAAAGGGACTGGTCTGGGTGTCGCGCATTGACCCCTACGACTCCGAAACCCATTACAATCA |
| | | GAAATTCAAGGACCGCTTCACCATCTCCGTGGACAAAGCCAAGAGCACCGCGTACCTCCAAA |
| | | TGAACTCCCTGCGCGCTGAGGATACAGCAGTGTACTATTGCGCCCGGGGAAACTGGGATGAT |
| | | TACTGGGGCCAGGGAACTACTGTGACTGTGTCATCCGGGGGTGGCGGTAGCGGAGGAGGGGG |
| | | CTCCGGCGGCGGCGGCTCAGGGGGCGGAGGAAGCGACGTGGTCATGACTCAGTCCCCGGACT |
| | | CACTCGCGGTGTCGCTTGGAGAGAGAGCGACCATCAACTGTCGGGCCTCAAAGAGCATCAGC |
| | | AAGGACCTGGCCTGGTACCAGCAGAAGCCGGGACAGCCGCCAAAGCTGCTGATCTACTCCGG |
| | | GTCCACCTTGCAATCTGGTGTCCCTGACCGGTTCTCCGGTTCCGGGTCGGGTACCGACTTCA |
| | | CGCTCACTATTTCGTCGCTGCAAGCCGAAGATGTGGCCGTGTACTATTGCCAACAGCACAAC |
| | | AAGTACCCCTACACTTTTGGCGGAGGCACCAAGGTGGAAATCAAGACCACTACCCCAGCACC |
| | | GAGGCCACCCACCCCGGCTCCTACCATCGCCTCCCAGCCTCTGTCCCTGCGTCCGGAggcat |
| | | gtagacccgcagctggtggggccgtgcatacccggggtcttgacttcgcctgcgatatctac |
| | | atttgggcccctctggctggtacttgcggggtcctgctgctttcactcgtgatcactcttta |
| | | ctgtaagcgcggtcggaagaagctgctgtacatctttaagcaacccttcatgaggcctgtgc |
| | | agactactcaagaggaggacggctgttcatgccggttcccagaggaggaggaaggcggctgc |
| | | gaactgcgcgtgaaattcagccgcagcgcagatgctccagcctacaagcaggggcagaacca |
| | | gctctacaacgaactcaatcttggtcggagagaggagtacgacgtgctggacaagcggagag |
| | | gacgggacccagaaatgggcgggaagccgcgcagaaagaatccccaagagggcctgtacaac |
| | | gagctccaaaaggataagatggcagaagcctatagcgagattggtatgaaaggggaacgcag |
| | | aagaggcaaaggccacgacggactgtaccagggactcagcaccgccaccaaggacacctatg |
| | | acgctcttcacatgcaggccctgccgcctcgg |
| hzCAR123-28 | 1279 | MALPVTALLLPLALLLHAARPEVQLVESGGGLVQPGGSLRLSCAASGYTFTSYWMNWVRQ |
| AA | | APGKGLVWVSRIDPYDSETHYNQKFKDRFTISVDKAKSTAYLQMNSLRAEDTAVYYCARG |
| | | NWDDYWGQGTTVTVSSGGGGSGGGGSGGGGSGGGGSDVVMTQSPDSLAVSLGERATINCR |
| | | ASKSISKDLAWYQQKPGQPPKLLIYSGSTLQSGVPDRFSGSGSGTDFTLTISSLQAEDVA |
| | | VYYCQQHNKYPYTFGGGTKVEIKTTTPAPRPPTPAPTIASQPLSLRPEACRPAAGGAVHT |
| | | RGLDFACDIYIWAPLAGTCGVLLLSLVITLYCKRGRKKLLYIFKQPFMRPVQTTQEEDGC |
| | | SCRFPEEEEGGCELRVKFSRSADAPAYKQGQNQLYNELNLGRREEYDVLDKRRGRDPEMG |
| | | GKPRRKNPQEGLYNELQKDKMAEAYSEIGMKGERRRGKGHDGLYQGLSTATKDTYDALHM |
| | | QALPPR |
| hzCAR123-28 | 1280 | MALPVTALLLPLALLLHAARPEVQLVESGGGLVQPGGSLRLSCAASGYTFTSYWMNWVRQ |
| scFv | | APGKGLVWVSRIDPYDSETHYNQKFKDRFTISVDKAKSTAYLQMNSLRAEDTAVYYCARG |
| | | NWDDYWGQGTTVTVSSGGGGSGGGGSGGGGSGGGGSDVVMTQSPDSLAVSLGERATINCR |
| | | ASKSISKDLAWYQQKPGQPPKLLIYSGSTLQSGVPDRFSGSGSGTDFTLTISSLQAEDVA |
| | | VYYCQQHNKYPYTFGGGTKVEIK |
| hzCAR123-28 | 1281 | EVQLVESGGGLVQPGGSLRLSCAASGYTFTSYWMNWVRQAPGKGLVWVSRIDPYDSETHYNQ |
| VH | | KFKDRFTISVDKAKSTAYLQMNSLRAEDTAVYYCARGNWDDYWGQGTTVTVSS |
| hzCAR123-28 | 1282 | DVVMTQSPDSLAVSLGERATINCRASKSISKDLAWYQQKPGQPPKLLIYSGSTLQSGVPDRF |
| VL | | SGSGSGTDFTLTISSLQAEDVAVYYCQQHNKYPYTFGGGTKVEIK |
| hzCAR123-29 | 1283 | ATGGCCCTCCCTGTCACCGCCCTGCTGCTTCCGCTGGCTCTTCTGCTCCACGCCGCTCGGCC |
| NT | | CGACGTGCAGCTCACCCAGTCGCCCTCATTTCTGTCGGCCTCAGTGGGAGACAGAGTGACCA |
| | | TTACTTGTCGGGCCTCCAAGAGCATCTCCAAGGACCTGGCCTGGTATCAGCAGAAGCCAGGA |
| | | AAGGCGCCTAAGTTGCTCATCTACTCGGGGTCGACCCTGCAATCTGGCGTGCCGTCCCGGTT |
| | | CTCCGGTTCGGGAAGCGGTACCGAATTCACCCTTACTATCTCCTCCCTGCAACCGGAGGACT |
| | | TCGCCACCTACTACTGCCAACAGCACAACAAGTACCCGTACACTTTCGGGGGTGGCACGAAG |
| | | GTCGAAATCAAGGGGGGTGGCGGTAGCGGAGGAGGGGGCTCCGGCGGCGGCGGCTCAGGGGG |
| | | CGGAGGAAGCGAAGTGCAGCTCGTCGAGAGCGGAGGGGGACTGGTGCAGCCCGGAGGAAGCC |
| | | TGAGGCTGTCCTGCGCTGCCTCCGGCTACACCTTCACCTCCTACTGGATGAACTGGGTCAGA |
| | | CAGGCACCTGGAAAGGGACTGGTCTGGGTGTCGCGCATTGACCCCTACGACTCCGAAACCCA |
| | | TTACAATCAGAAATTCAAGGACCGCTTCACCATCTCCGTGGACAAAGCCAAGAGCACCGCGT |
| | | ACCTCCAAATGAACTCCCTGCGCGCTGAGGATACAGCAGTGTACTATTGCGCCCGGGGAAAC |
| | | TGGGATGATTACTGGGGCCAGGGAACTACTGTGACTGTGTCATCCACCACTACCCCAGCACC |
| | | GAGGCCACCCACCCCGGCTCCTACCATCGCCTCCCAGCCTCTGTCCCTGCGTCCGGAggcat |
| | | gtagacccgcagctggtggggccgtgcatacccggggtcttgacttcgcctgcgatatctac |
| | | atttgggcccctctggctggtacttgcggggtcctgctgctttcactcgtgatcactcttta |
| | | ctgtaagcgcggtcggaagaagctgctgtacatctttaagcaacccttcatgaggcctgtgc |
| | | agactactcaagaggaggacggctgttcatgccggttcccagaggaggaggaaggcggctgc |
| | | gaactgcgcgtgaaattcagccgcagcgcagatgctccagcctacaagcaggggcagaacca |
| | | gctctacaacgaactcaatcttggtcggagagaggagtacgacgtgctggacaagcggagag |
| | | gacgggacccagaaatgggcgggaagccgcgcagaaagaatccccaagagggcctgtacaac |
| | | gagctccaaaaggataagatggcagaagcctatagcgagattggtatgaaaggggaacgcag |
| | | aagaggcaaaggccacgacggactgtaccagggactcagcaccgccaccaaggacacctatg |
| | | acgctcttcacatgcaggccctgccgcctcgg |
| hzCAR123-29 | 1284 | MALPVTALLLPLALLLHAARPDVQLTQSPSFLSASVGDRVTITCRASKSISKDLAWYQQK |
| AA | | PGKAPKLLIYSGSTLQSGVPSRFSGSGSGTEFTLTISSLQPEDFATYYCQQHNKYPYTFG |
| | | GGTKVEIKGGGGSGGGGSGGGGSGGGGSEVQLVESGGGLVQPGGSLRLSCAASGYTFTSY |
| | | WMNWVRQAPGKGLVWVSRIDPYDSETHYNQKFKDRFTISVDKAKSTAYLQMNSLRAEDTA |
| | | VYYCARGNWDDYWGQGTTVTVSSTTTPAPRPPTPAPTIASQPLSLRPEACRPAAGGAVHT |
| | | RGLDFACDIYIWAPLAGTCGVLLLSLVITLYCKRGRKKLLYIFKQPFMRPVQTTQEEDGC |
| | | SCRFPEEEEGGCELRVKFSRSADAPAYKQGQNQLYNELNLGRREEYDVLDKRRGRDPEMG |
| | | GKPRRKNPQEGLYNELQKDKMAEAYSEIGMKGERRRGKGHDGLYQGLSTATKDTYDALHM |
| | | QALPPR |
| hzCAR123-29 | 1285 | MALPVTALLLPLALLLHAARPDVQLTQSPSFLSASVGDRVTITCRASKSISKDLAWYQQK |
| scFv | | PGKAPKLLIYSGSTLQSGVPSRFSGSGSGTEFTLTISSLQPEDFATYYCQQHNKYPYTFG |
| | | GGTKVEIKGGGGSGGGGSGGGGSGGGGSEVQLVESGGGLVQPGGSLRLSCAASGYTFTSY |
| | | WMNWVRQAPGKGLVWVSRIDPYDSETHYNQKFKDRFTISVDKAKSTAYLQMNSLRAEDTA |
| | | VYYCARGNWDDYWGQGTTVTVSS |
| hzCAR123-29 | 1286 | EVQLVESGGGLVQPGGSLRLSCAASGYTFTSYWMNWVRQAPGKGLVWVSRIDPYDSETHYNQ |
| VH | | KFKDRFTISVDKAKSTAYLQMNSLRAEDTAVYYCARGNWDDYWGQGTTVTVSS |
| hzCAR123-29 | 1287 | DVQLTQSPSFLSASVGDRVTITCRASKSISKDLAWYQQKPGKAPKLLIYSGSTLQSGVPSRF |
| VL | | SGSGSGTEFTLTISSLQPEDFATYYCQQHNKYPYTFGGGTKVEIK |
| hzCAR123-30 | 1288 | ATGGCCCTCCCTGTCACCGCCCTGCTGCTTCCGCTGGCTCTTCTGCTCCACGCCGCTCGGCC |
| NT | | CGAAGTGGTGCTGACCCAGTCGCCCGCAACCCTCTCTCTGTCGCCGGGAGAACGCGCCACTC |
| | | TTTCCTGTCGGGCGTCCAAGAGCATCTCAAAGGACCTCGCCTGGTACCAGCAGAAGCCTGGT |
| | | CAAGCCCCGCGGCTGCTGATCTACTCCGGCTCCACGCTGCAATCAGGAATCCCAGCCAGATT |
| | | TTCCGGTTCGGGGTCGGGGACTGACTTCACCTTGACCATTAGCTCGCTGGAACCTGAGGACT |
| | | TCGCCGTGTATTACTGCCAGCAGCACAACAAGTACCCGTACACCTTCGGAGGCGGTACTAAG |
| | | GTCGAGATCAAGGGGGGTGGCGGTAGCGGAGGAGGGGGCTCCGGCGGCGGCGGCTCAGGGGG |
| | | CGGAGGAAGCGAAGTGCAGCTCGTCGAGAGCGGAGGGGGACTGGTGCAGCCCGGAGGAAGCC |
| | | TGAGGCTGTCCTGCGCTGCCTCCGGCTACACCTTCACCTCCTACTGGATGAACTGGGTCAGA |
| | | CAGGCACCTGGAAAGGGACTGGTCTGGGTGTCGCGCATTGACCCCTACGACTCCGAAACCCA |
| | | TTACAATCAGAAATTCAAGGACCGCTTCACCATCTCCGTGGACAAAGCCAAGAGCACCGCGT |
| | | ACCTCCAAATGAACTCCCTGCGCGCTGAGGATACAGCAGTGTACTATTGCGCCCGGGGAAAC |
| | | TGGGATGATTACTGGGGCCAGGGAACTACTGTGACTGTGTCATCCACCACTACCCCAGCACC |
| | | GAGGCCACCCACCCCGGCTCCTACCATCGCCTCCCAGCCTCTGTCCCTGCGTCCGGAggcat |
| | | gtagacccgcagctggtggggccgtgcatacccggggtcttgacttcgcctgcgatatctac |
| | | atttgggcccctctggctggtacttgcggggtcctgctgctttcactcgtgatcactcttta |
| | | ctgtaagcgcggtcggaagaagctgctgtacatctttaagcaacccttcatgaggcctgtgc |
| | | agactactcaagaggaggacggctgttcatgccggttcccagaggaggaggaaggcggctgc |
| | | gaactgcgcgtgaaattcagccgcagcgcagatgctccagcctacaagcaggggcagaacca |
| | | gctctacaacgaactcaatcttggtcggagagaggagtacgacgtgctggacaagcggagag |
| | | gacgggacccagaaatgggcgggaagccgcgcagaaagaatccccaagagggcctgtacaac |
| | | gagctccaaaaggataagatggcagaagcctatagcgagattggtatgaaaggggaacgcag |
| | | aagaggcaaaggccacgacggactgtaccagggactcagcaccgccaccaaggacacctatg |
| | | acgctcttcacatgcaggccctgccgcctcgg |
| hzCAR123-30 | 1289 | MALPVTALLLPLALLLHAARPEVVLTQSPATLSLSPGERATLSCRASKSISKDLAWYQQK |
| AA | | PGQAPRLLIYSGSTLQSGIPARFSGSGSGTDFTLTISSLEPEDFAVYYCQQHNKYPYTFG |
| | | GGTKVEIKGGGGSGGGGSGGGGSGGGGSEVQLVESGGGLVQPGGSLRLSCAASGYTFTSY |
| | | WMNWVRQAPGKGLVWVSRIDPYDSETHYNQKFKDRFTISVDKAKSTAYLQMNSLRAEDTA |
| | | VYYCARGNWDDYWGQGTTVTVSSTTTPAPRPPTPAPTIASQPLSLRPEACRPAAGGAVHT |
| | | RGLDFACDIYIWAPLAGTCGVLLLSLVITLYCKRGRKKLLYIFKQPFMRPVQTTQEEDGC |
| | | SCRFPEEEEGGCELRVKFSRSADAPAYKQGQNQLYNELNLGRREEYDVLDKRRGRDPEMG |
| | | GKPRRKNPQEGLYNELQKDKMAEAYSEIGMKGERRRGKGHDGLYQGLSTATKDTYDALHM |
| | | QALPPR |
| hzCAR123-30 | 1290 | MALPVTALLLPLALLLHAARPEVVLTQSPATLSLSPGERATLSCRASKSISKDLAWYQQK |
| scFv | | PGQAPRLLIYSGSTLQSGIPARFSGSGSGTDFTLTISSLEPEDFAVYYCQQHNKYPYTFG |
| | | GGTKVEIKGGGGSGGGGSGGGGSGGGGSEVQLVESGGGLVQPGGSLRLSCAASGYTFTSY |
| | | WMNWVRQAPGKGLVWVSRIDPYDSETHYNQKFKDRFTISVDKAKSTAYLQMNSLRAEDTA |
| | | VYYCARGNWDDYWGQGTTVTVSS |
| hzCAR123-30 | 1291 | EVQLVESGGGLVQPGGSLRLSCAASGYTFTSYWMNWVRQAPGKGLVWVSRIDPYDSETHYNQ |
| VH | | KFKDRFTISVDKAKSTAYLQMNSLRAEDTAVYYCARGNWDDYWGQGTTVTVSS |
| hzCAR123-30 | 1292 | EVVLTQSPATLSLSPGERATLSCRASKSISKDLAWYQQKPGQAPRLLIYSGSTLQSGIPARF |
| VL | | SGSGSGTDFTLTISSLEPEDFAVYYCQQHNKYPYTFGGGTKVEIK |
| hzCAR123-31 | 1293 | ATGGCCCTCCCTGTCACCGCCCTGCTGCTTCCGCTGGCTCTTCTGCTCCACGCCGCTCGGCC |
| NT | | CGACGTCGTGATGACCCAGTCACCGGCATTCCTGTCCGTGACTCCCGGAGAAAAGGTCACGA |
| | | TTACTTGCCGGGCGTCCAAGAGCATCTCCAAGGACCTCGCCTGGTACCAACAGAAGCCGGAC |
| | | CAGGCCCCTAAGCTGTTGATCTACTCGGGGTCCACCCTTCAATCGGGAGTGCCATCGCGGTT |
| | | TAGCGGTTCGGGTTCTGGGACCGACTTCACTTTCACCATCTCCTCACTGGAAGCCGAGGATG |
| | | CCGCCACTTACTACTGTCAGCAGCACAACAAGTATCCGTACACCTTCGGAGGCGGTACCAAA |
| | | GTGGAGATCAAGGGGGGTGGCGGTAGCGGAGGAGGGGGCTCCGGCGGCGGCGGCTCAGGGGG |
| | | CGGAGGAAGCGAAGTGCAGCTCGTCGAGAGCGGAGGGGGACTGGTGCAGCCCGGAGGAAGCC |
| | | TGAGGCTGTCCTGCGCTGCCTCCGGCTACACCTTCACCTCCTACTGGATGAACTGGGTCAGA |
| | | CAGGCACCTGGAAAGGGACTGGTCTGGGTGTCGCGCATTGACCCCTACGACTCCGAAACCCA |
| | | TTACAATCAGAAATTCAAGGACCGCTTCACCATCTCCGTGGACAAAGCCAAGAGCACCGCGT |
| | | ACCTCCAAATGAACTCCCTGCGCGCTGAGGATACAGCAGTGTACTATTGCGCCCGGGGAAAC |
| | | TGGGATGATTACTGGGGCCAGGGAACTACTGTGACTGTGTCATCCACCACTACCCCAGCACC |
| | | GAGGCCACCCACCCCGGCTCCTACCATCGCCTCCCAGCCTCTGTCCCTGCGTCCGGAggcat |
| | | gtagacccgcagctggtggggccgtgcatacccggggtcttgacttcgcctgcgatatctac |
| | | atttgggcccctctggctggtacttgcggggtcctgctgctttcactcgtgatcactcttta |
| | | ctgtaagcgcggtcggaagaagctgctgtacatctttaagcaacccttcatgaggcctgtgc |
| | | agactactcaagaggaggacggctgttcatgccggttcccagaggaggaggaaggcggctgc |
| | | gaactgcgcgtgaaattcagccgcagcgcagatgctccagcctacaagcaggggcagaacca |
| | | gctctacaacgaactcaatcttggtcggagagaggagtacgacgtgctggacaagcggagag |
| | | gacgggacccagaaatgggcgggaagccgcgcagaaagaatccccaagagggcctgtacaac |
| | | gagctccaaaaggataagatggcagaagcctatagcgagattggtatgaaaggggaacgcag |
| | | aagaggcaaaggccacgacggactgtaccagggactcagcaccgccaccaaggacacctatg |
| | | acgctcttcacatgcaggccctgccgcctcgg |
| hzCAR123-31 | 1294 | MALPVTALLLPLALLLHAARPDVVMTQSPAFLSVTPGEKVTITCRASKSISKDLAWYQQK |
| AA | | PDQAPKLLIYSGSTLQSGVPSRFSGSGSGTDFTFTISSLEAEDAATYYCQQHNKYPYTFG |
| | | GGTKVEIKGGGGSGGGGSGGGGSGGGGSEVQLVESGGGLVQPGGSLRLSCAASGYTFTSY |
| | | WMNWVRQAPGKGLVWVSRIDPYDSETHYNQKFKDRFTISVDKAKSTAYLQMNSLRAEDTA |
| | | VYYCARGNWDDYWGQGTTVTVSSTTTPAPRPPTPAPTIASQPLSLRPEACRPAAGGAVHT |
| | | RGLDFACDIYIWAPLAGTCGVLLLSLVITLYCKRGRKKLLYIFKQPFMRPVQTTQEEDGC |
| | | SCRFPEEEEGGCELRVKFSRSADAPAYKQGQNQLYNELNLGRREEYDVLDKRRGRDPEMG |
| | | GKPRRKNPQEGLYNELQKDKMAEAYSEIGMKGERRRGKGHDGLYQGLSTATKDTYDALHM |
| | | QALPPR |
| hzCAR123-31 | 1295 | MALPVTALLLPLALLLHAARPDVVMTQSPAFLSVTPGEKVTITCRASKSISKDLAWYQQK |
| scFv | | PDQAPKLLIYSGSTLQSGVPSRFSGSGSGTDFTFTISSLEAEDAATYYCQQHNKYPYTFG |
| | | GGTKVEIKGGGGSGGGGSGGGGSGGGGSEVQLVESGGGLVQPGGSLRLSCAASGYTFTSY |
| | | WMNWVRQAPGKGLVWVSRIDPYDSETHYNQKFKDRFTISVDKAKSTAYLQMNSLRAEDTA |
| | | VYYCARGNWDDYWGQGTTVTVSS |
| hzCAR123-31 | 1296 | EVQLVESGGGLVQPGGSLRLSCAASGYTFTSYWMNWVRQAPGKGLVWVSRIDPYDSETHYNQ |
| VH | | KFKDRFTISVDKAKSTAYLQMNSLRAEDTAVYYCARGNWDDYWGQGTTVTVSS |
| hzCAR123-31 | 1297 | DVVMTQSPAFLSVTPGEKVTITCRASKSISKDLAWYQQKPDQAPKLLIYSGSTLQSGVPSRF |
| VL | | SGSGSGTDFTFTISSLEAEDAATYYCQQHNKYPYTFGGGTKVEIK |
| hzCAR123-32 | 1298 | ATGGCCCTCCCTGTCACCGCCCTGCTGCTTCCGCTGGCTCTTCTGCTCCACGCCGCTCGGCC |
| NT | | CGACGTGGTCATGACTCAGTCCCCGGACTCACTCGCGGTGTCGCTTGGAGAGAGAGCGACCA |
| | | TCAACTGTCGGGCCTCAAAGAGCATCAGCAAGGACCTGGCCTGGTACCAGCAGAAGCCGGGA |
| | | CAGCCGCCAAAGCTGCTGATCTACTCCGGGTCCACCTTGCAATCTGGTGTCCCTGACCGGTT |
| | | CTCCGGTTCCGGGTCGGGTACCGACTTCACGCTCACTATTTCGTCGCTGCAAGCCGAAGATG |
| | | TGGCCGTGTACTATTGCCAACAGCACAACAAGTACCCCTACACTTTTGGCGGAGGCACCAAG |
| | | GTGGAAATCAAGGGGGGTGGCGGTAGCGGAGGAGGGGGCTCCGGCGGCGGCGGCTCAGGGGG |
| | | CGGAGGAAGCGAAGTGCAGCTCGTCGAGAGCGGAGGGGGACTGGTGCAGCCCGGAGGAAGCC |
| | | TGAGGCTGTCCTGCGCTGCCTCCGGCTACACCTTCACCTCCTACTGGATGAACTGGGTCAGA |
| | | CAGGCACCTGGAAAGGGACTGGTCTGGGTGTCGCGCATTGACCCCTACGACTCCGAAACCCA |
| | | TTACAATCAGAAATTCAAGGACCGCTTCACCATCTCCGTGGACAAAGCCAAGAGCACCGCGT |
| | | ACCTCCAAATGAACTCCCTGCGCGCTGAGGATACAGCAGTGTACTATTGCGCCCGGGGAAAC |
| | | TGGGATGATTACTGGGGCCAGGGAACTACTGTGACTGTGTCATCCACCACTACCCCAGCACC |
| | | GAGGCCACCCACCCCGGCTCCTACCATCGCCTCCCAGCCTCTGTCCCTGCGTCCGGAggcat |
| | | gtagacccgcagctggtggggccgtgcatacccggggtcttgacttcgcctgcgatatctac |
| | | atttgggcccctctggctggtacttgcggggtcctgctgctttcactcgtgatcactcttta |
| | | ctgtaagcgcggtcggaagaagctgctgtacatctttaagcaacccttcatgaggcctgtgc |
| | | agactactcaagaggaggacggctgttcatgccggttcccagaggaggaggaaggcggctgc |
| | | gaactgcgcgtgaaattcagccgcagcgcagatgctccagcctacaagcaggggcagaacca |
| | | gctctacaacgaactcaatcttggtcggagagaggagtacgacgtgctggacaagcggagag |
| | | gacgggacccagaaatgggcgggaagccgcgcagaaagaatccccaagagggcctgtacaac |
| | | gagctccaaaaggataagatggcagaagcctatagcgagattggtatgaaaggggaacgcag |
| | | aagaggcaaaggccacgacggactgtaccagggactcagcaccgccaccaaggacacctatg |
| | | acgctcttcacatgcaggccctgccgcctcgg |
| hzCAR123-32 | 1299 | MALPVTALLLPLALLLHAARPDVVMTQSPDSLAVSLGERATINCRASKSISKDLAWYQQK |
| AA | | PGQPPKLLIYSGSTLQSGVPDRFSGSGSGTDFTLTISSLQAEDVAVYYCQQHNKYPYTFG |
| | | GGTKVEIKGGGGSGGGGSGGGGSGGGGSEVQLVESGGGLVQPGGSLRLSCAASGYTFTSY |
| | | WMNWVRQAPGKGLVWVSRIDPYDSETHYNQKFKDRFTISVDKAKSTAYLQMNSLRAEDTA |
| | | VYYCARGNWDDYWGQGTTVTVSSTTTPAPRPPTPAPTIASQPLSLRPEACRPAAGGAVHT |
| | | RGLDFACDIYIWAPLAGTCGVLLLSLVITLYCKRGRKKLLYIFKQPFMRPVQTTQEEDGC |
| | | SCRFPEEEEGGCELRVKFSRSADAPAYKQGQNQLYNELNLGRREEYDVLDKRRGRDPEMG |
| | | GKPRRKNPQEGLYNELQKDKMAEAYSEIGMKGERRRGKGHDGLYQGLSTATKDTYDALHM |
| | | QALPPR |
| hzCAR123-32 | 1300 | MALPVTALLLPLALLLHAARPDVVMTQSPDSLAVSLGERATINCRASKSISKDLAWYQQK |
| scFv | | PGQPPKLLIYSGSTLQSGVPDRFSGSGSGTDFTLTISSLQAEDVAVYYCQQHNKYPYTFG |
| | | GGTKVEIKGGGGSGGGGSGGGGSGGGGSEVQLVESGGGLVQPGGSLRLSCAASGYTFTSY |
| | | WMNWVRQAPGKGLVWVSRIDPYDSETHYNQKFKDRFTISVDKAKSTAYLQMNSLRAEDTA |
| | | VYYCARGNWDDYWGQGTTVTVSS |
| hzCAR123-32 | 1301 | EVQLVESGGGLVQPGGSLRLSCAASGYTFTSYWMNWVRQAPGKGLVWVSRIDPYDSETHYNQ |
| VH | | KFKDRFTISVDKAKSTAYLQMNSLRAEDTAVYYCARGNWDDYWGQGTTVTVSS |
| hzCAR123-32 | 1302 | DVVMTQSPDSLAVSLGERATINCRASKSISKDLAWYQQKPGQPPKLLIYSGSTLQSGVPDRF |
| VL | | SGSGSGTDFTLTISSLQAEDVAVYYCQQHNKYPYTFGGGTKVEIK |

[1338] The sequences of humanized CDR sequences of the scFv domains of hzCD123 CAR 1-32 are shown in Table 26 for the heavy chain variable domains and in Table 27 for the light chain variable domains. “ID” stands for the respective SEQ ID NO for each CDR.

TABLE 26
Heavy Chain Variable Domain CDR

| | | SEQ | | SEQ | | SEQ |
|---|---|---|---|---|---|---|
| | | ID | | ID | | ID |
| | HCDR1 | NO: | HCDR2 | NO: | HCDR3 | NO: |
| hzCAR123 | GYTFTSYWMN | 1102 | RIDPYDSETHYNQKFKD | 1103 | GNWDDY | 1104 |

TABLE 27
Light Chain Variable Domain CDR

| | | SEQ | | SEQ | | SEQ |
|---|---|---|---|---|---|---|
| | | ID | | ID | | ID |
| | LCDR1 | NO: | LCDR2 | NO: | LCDR3 | NO: |
| hzCAR123 | RASKSISKD | 1105 | SGSTLQS | 1106 | QQHNKYPYT | 1107 |
| | LA | | | | | |

[1339] In some embodiments, the CAR123 has a HCDR3 having the sequence YCARGNWDDY (SEQ ID NO: 1529).

[1340] The CAR scFv fragments were then cloned into lentiviral vectors to create a full length CAR construct in a single coding frame, and using the EF1 alpha promoter for expression.

### Bispecific CAR19/CAR22 Constructs and Function Thereof

[1341] This section describes the production and function of bispecific CAR19/CAR22 constructs. Two bispecific scFv tandem fusions were designed: antiCD22 (HL)4G4S-antiCD19 (LH) and antiCD19-4G4S-antiCD22. The designation (HL) indicates that the heavy chain variable region is upstream of the light chain region within the indicated scFv, and the designation (LH) indicates that the light chain variable region is upstream of the heavy chain region within the indicated scFv. The anti-CD22 base molecule is hCD22-2, and uses the HL orientation. The anti-CD19 base molecule is a humanized anti-CD19 sequence, provided herein as construct ID 104876 of Table 2, which uses the LH orientation. The constructs are illustrated schematically in FIG. 13.

[1342] The nucleotide and amino acid sequences of both bispecific constructs, as well as the scFv portions thereof, are given below in Table 28.

TABLE 28
Bispecific CAR19/CAR22 constructs

| | SEQ | |
|---|---|---|
| Name | ID NO | Sequence |
| antiCD22- | 1303 | EVQLQQSGPGLVKPSQTLSLTCAISGDSVSSNSAAWNWIRQSPSRGLEW |
| 4G4S- | | LGRTYYRSKWYNDYAVSVKSRITINPDTSKNQFSLQLNSVTPEDTAVYY |
| antiCD19 | | CARDLGWIAVAGTFDYWGQGTLVTVSSGGGGSGGGGSGGGGSQSALTQP |
| scFv amino | | ASVSGSPGQSITISCTGTSSDVGGYNYVSWYQQHPGKAPKLMIYDVSKR |
| acid sequence | | PSGVSNRFSGSKSGNTASLTISGLQAEDEADYYCSSYTSSSLNHVFGTG |
| | | TKVTVLTGGGGSGGGGSGGGGSGGGGSEIVMTQSPATLSLSPGERATLS |
| | | CRASQDISKYLNWYQQKPGQAPRLLIYHTSRLHSGIPARFSGSGSGTDY |
| | | TLTISSLQPEDFAVYFCQQGNTLPYTFGQGTKLEIKGGGGSGGGGSGGG |
| | | GSQVQLQESGPGLVKPSETLSLTCTVSGVSLPDYGVSWIRQPPGKGLEW |
| | | IGVIWGSETTYYQSSLKSRVTISKDNSKNQVSLKLSSVTAADTAVYYCA |
| | | KHYYYGGSYAMDYWGQGTLVTVSS |
| antiCD22- | 1304 | EVQLQQSGPGLVKPSQTLSLTCAISGDSVSSNSAAWNWIRQSPSRGLEW |
| CD19 CAR | | LGRTYYRSKWYNDYAVSVKSRITINPDTSKNQFSLQLNSVTPEDTAVYY |
| amino acid | | CARDLGWIAVAGTFDYWGQGTLVTVSSGGGGSGGGGSGGGGSQSALTQP |
| sequence | | ASVSGSPGQSITISCTGTSSDVGGYNYVSWYQQHPGKAPKLMIYDVSKR |
| | | PSGVSNRFSGSKSGNTASLTISGLQAEDEADYYCSSYTSSSLNHVFGTG |
| | | TKVTVLTGGGGSGGGGSGGGGSGGGGSEIVMTQSPATLSLSPGERATLS |
| | | CRASQDISKYLNWYQQKPGQAPRLLIYHTSRLHSGIPARFSGSGSGTDY |
| | | TLTISSLQPEDFAVYFCQQGNTLPYTFGQGTKLEIKGGGGSGGGGSGGG |
| | | GSQVQLQESGPGLVKPSETLSLTCTVSGVSLPDYGVSWIRQPPGKGLEW |
| | | IGVIWGSETTYYQSSLKSRVTISKDNSKNQVSLKLSSVTAADTAVYYCA |
| | | KHYYYGGSYAMDYWGQGTLVTVSSTTTPAPRPPTPAPTIASQPLSLRPE |
| | | ACRPAAGGAVHTRGLDFACDIYIWAPLAGTCGVLLLSLVITLYCKRGRK |
| | | KLLYIFKQPFMRPVQTTQEEDGCSCRFPEEEEGGCELRVKFSRSADAPA |
| | | YKQGQNQLYNELNLGRREEYDVLDKRRGRDPEMGGKPRRKNPQEGLYNE |
| | | LQKDKMAEAYSEIGMKGERRRGKGHDGLYQGLSTATKDTYDALHMQALP |
| | | PR |
| antiCD22- | 1305 | gaagtgcagctccaacagtcaggaccaggactcgtcaaaccctcccaaa |
| 4G4S- | | ccctcagccttacttgtgccatttccggggattccgtgtcgagcaattc |
| antiCD19 | | cgccgcctggaactggatcaggcagtccccgtcgcgcgggctcgaatgg |
| scFv nucleic | | ctgggacgcacttactaccggtccaagtggtacaacgactacgccgtca |
| sequence | | gcgtgaagtcgcggatcaccattaaccccgacacctccaagaaccagtt |
| | | cagcctccaactgaactccgtgacccctgaggataccgcggtctactat |
| | | tgtgcccgggacctgggttggattgccgtggccgggaccttcgattact |
| | | ggggccagggaactctcgtcaccgtgtcctcgggagggggtggctcagg |
| | | gggtggtggatcgggtggtggcggctcccagtccgctctgactcagccc |
| | | gcgtccgtgtccggttccccgggacagtcgatcacaatcagctgcactg |
| | | gcacctcctccgacgtcggcgggtacaactacgtgtcgtggtaccaaca |
| | | gcaccctggaaaagccccgaagctgatgatctacgacgtgtccaagagg |
| | | ccaagcggagtgtcaaatcgcttttccggctcgaagtcgggaaacaccg |
| | | ccagcctgactatctcgggactgcaggccgaggacgaggccgactacta |
| | | ctgctcgtcttacacctcctcatccttgaaccacgtgttcggaaccgga |
| | | accaaggtcaccgtgctgactggagggggaggctccggtggcggcggct |
| | | ctggaggaggagggtccggcggaggaggatcggaaatcgtgatgaccca |
| | | gtcccccgcaaccctgtccctgagcccgggcgaaagagctaccctgtcg |
| | | tgccgggcgtcgcaggacatctccaagtacctgaactggtaccagcaga |
| | | agcccggccaggcaccgagactgctgatctaccacactagccgcctgca |
| | | ttccggtatccccgcacggttcagcggcagcgggagcggaaccgattac |
| | | acgctcactatttcctcactgcaacccgaggatttcgctgtgtacttct |
| | | gccaacaaggaaacaccctgccttataccttcggacagggtacaaagct |
| | | ggagattaagggaggagggggctccggcggcgggggcagcgggggcggc |
| | | ggaagccaggtccagctgcaggaatccggtccgggactcgtgaagccct |
| | | ccgaaactctctcccttacgtgcaccgtgtcaggggtgtccctgccgga |
| | | ctacggagtgtcctggattcggcaacctccggggaagggactggagtgg |
| | | atcggagtgatctggggctccgaaactacctactaccagtcatcattga |
| | | agtcaagagtgaccatttcgaaggacaacagcaagaaccaggtgtccct |
| | | taaactgtccagcgtgaccgcggcggatactgccgtctactactgcgcc |
| | | aagcactattactacggcggaagctatgcgatggactactggggacagg |
| | | gcaccttggtcactgtgtcctcc |
| antiCD22- | 1306 | gaagtgcagctccaacagtcaggaccaggactcgtcaaaccctcccaaa |
| CD19 CAR | | ccctcagccttacttgtgccatttccggggattccgtgtcgagcaattc |
| nucleic acid | | cgccgcctggaactggatcaggcagtccccgtcgcgcgggctcgaatgg |
| sequence | | ctgggacgcacttactaccggtccaagtggtacaacgactacgccgtca |
| | | gcgtgaagtcgcggatcaccattaaccccgacacctccaagaaccagtt |
| | | cagcctccaactgaactccgtgacccctgaggataccgcggtctactat |
| | | tgtgcccgggacctgggttggattgccgtggccgggaccttcgattact |
| | | ggggccagggaactctcgtcaccgtgtcctcgggagggggtggctcagg |
| | | gggtggtggatcgggtggtggcggctcccagtccgctctgactcagccc |
| | | gcgtccgtgtccggttccccgggacagtcgatcacaatcagctgcactg |
| | | gcacctcctccgacgtcggcgggtacaactacgtgtcgtggtaccaaca |
| | | gcaccctggaaaagccccgaagctgatgatctacgacgtgtccaagagg |
| | | ccaagcggagtgtcaaatcgcttttccggctcgaagtcgggaaacaccg |
| | | ccagcctgactatctcgggactgcaggccgaggacgaggccgactacta |
| | | ctgctcgtcttacacctcctcatccttgaaccacgtgttcggaaccgga |
| | | accaaggtcaccgtgctgactggagggggaggctccggtggcggcggct |
| | | ctggaggaggagggtccggcggaggaggatcggaaatcgtgatgaccca |
| | | gtcccccgcaaccctgtccctgagcccgggcgaaagagctaccctgtcg |
| | | tgccgggcgtcgcaggacatctccaagtacctgaactggtaccagcaga |
| | | agcccggccaggcaccgagactgctgatctaccacactagccgcctgca |
| | | ttccggtatccccgcacggttcagcggcagcgggagcggaaccgattac |
| | | acgctcactatttcctcactgcaacccgaggatttcgctgtgtacttct |
| | | gccaacaaggaaacaccctgccttataccttcggacagggtacaaagct |
| | | ggagattaagggaggagggggctccggcggcgggggcagcgggggcggc |
| | | ggaagccaggtccagctgcaggaatccggtccgggactcgtgaagccct |
| | | ccgaaactctctcccttacgtgcaccgtgtcaggggtgtccctgccgga |
| | | ctacggagtgtcctggattcggcaacctccggggaagggactggagtgg |
| | | atcggagtgatctggggctccgaaactacctactaccagtcatcattga |
| | | agtcaagagtgaccatttcgaaggacaacagcaagaaccaggtgtccct |
| | | taaactgtccagcgtgaccgcggcggatactgccgtctactactgcgcc |
| | | aagcactattactacggcggaagctatgcgatggactactggggacagg |
| | | gcaccttggtcactgtgtcctccaccactaccccagcaccgaggccacc |
| | | caccccggctcctaccatcgcctcccagcctctgtccctgcgtccggag |
| | | gcatgtagacccgcagctggtggggccgtgcatacccggggtcttgact |
| | | tcgcctgcgatatctacatttgggcccctctggctggtacttgcggggt |
| | | cctgctgctttcactcgtgatcactctttactgtaagcgcggtcggaag |
| | | aagctgctgtacatctttaagcaacccttcatgaggcctgtgcagacta |
| | | ctcaagaggaggacggctgttcatgccggttcccagaggaggaggaagg |
| | | cggctgcgaactgcgcgtgaaattcagccgcagcgcagatgctccagcc |
| | | tacaagcaggggcagaaccagctctacaacgaactcaatcttggtcgga |
| | | gagaggagtacgacgtgctggacaagcggagaggacgggacccagaaat |
| | | gggcgggaagccgcgcagaaagaatccccaagagggcctgtacaacgag |
| | | ctccaaaaggataagatggcagaagcctatagcgagattggtatgaaag |
| | | gggaacgcagaagaggcaaaggccacgacggactgtaccagggactcag |
| | | caccgccaccaaggacacctatgacgctcttcacatgcaggccctgccg |
| | | cctcgg |
| antiCD19- | 1307 | EIVMTQSPATLSLSPGERATLSCRASQDISKYLNWYQQKPGQAPRLLIY |
| 4G4S- | | HTSRLHSGIPARFSGSGSGTDYTLTISSLQPEDFAVYFCQQGNTLPYTF |
| antiCD22 | | GQGTKLEIKGGGGSGGGGSGGGGSQVQLQESGPGLVKPSETLSLTCTVS |
| scFv amino | | GVSLPDYGVSWIRQPPGKGLEWIGVIWGSETTYYQSSLKSRVTISKDNS |
| acid sequence | | KNQVSLKLSSVTAADTAVYYCAKHYYYGGSYAMDYWGQGTLVTVSSGGG |
| | | GSGGGGSGGGGSGGGGSEVQLQQSGPGLVKPSQTLSLTCAISGDSVSSN |
| | | SAAWNWIRQSPSRGLEWLGRTYYRSKWYNDYAVSVKSRITINPDTSKNQ |
| | | FSLQLNSVTPEDTAVYYCARDLGWIAVAGTFDYWGQGTLVTVSSGGGGS |
| | | GGGGSGGGGSQSALTQPASVSGSPGQSITISCTGTSSDVGGYNYVSWYQ |
| | | QHPGKAPKLMIYDVSKRPSGVSNRFSGSKSGNTASLTISGLQAEDEADY |
| | | YCSSYTSSSLNHVFGTGTKVTVLT |
| antiCD19- | 1308 | EIVMTQSPATLSLSPGERATLSCRASQDISKYLNWYQQKPGQAPRLLIY |
| 4G4S- | | HTSRLHSGIPARFSGSGSGTDYTLTISSLQPEDFAVYFCQQGNTLPYTF |
| antiCD22 | | GQGTKLEIKGGGGSGGGGSGGGGSQVQLQESGPGLVKPSETLSLTCTVS |
| CAR amino | | GVSLPDYGVSWIRQPPGKGLEWIGVIWGSETTYYQSSLKSRVTISKDNS |
| acid sequence | | KNQVSLKLSSVTAADTAVYYCAKHYYYGGSYAMDYWGQGTLVTVSSGGG |
| | | GSGGGGSGGGGSGGGGSEVQLQQSGPGLVKPSQTLSLTCAISGDSVSSN |
| | | SAAWNWIRQSPSRGLEWLGRTYYRSKWYNDYAVSVKSRITINPDTSKNQ |
| | | FSLQLNSVTPEDTAVYYCARDLGWIAVAGTFDYWGQGTLVTVSSGGGGS |
| | | GGGGSGGGGSQSALTQPASVSGSPGQSITISCTGTSSDVGGYNYVSWYQ |
| | | QHPGKAPKLMIYDVSKRPSGVSNRFSGSKSGNTASLTISGLQAEDEADY |
| | | YCSSYTSSSLNHVFGTGTKVTVLTTTTPAPRPPTPAPTIASQPLSLRPE |
| | | ACRPAAGGAVHTRGLDFACDIYIWAPLAGTCGVLLLSLVITLYCKRGRK |
| | | KLLYIFKQPFMRPVQTTQEEDGCSCRFPEEEEGGCELRVKFSRSADAPA |
| | | YKQGQNQLYNELNLGRREEYDVLDKRRGRDPEMGGKPRRKNPQEGLYNE |
| | | LQKDKMAEAYSEIGMKGERRRGKGHDGLYQGLSTATKDTYDALHMQALP |
| | | PR |
| antiCD19- | 1309 | gaaatcgtgatgacccagtcccccgcaaccctgtccctgagcccgggcg |
| 4G4S- | | aaagagctaccctgtcgtgccgggcgtcgcaggacatctccaagtacct |
| antiCD22 | | gaactggtaccagcagaagcccggccaggcaccgagactgctgatctac |
| scFv nucleic | | cacactagccgcctgcattccggtatccccgcacggttcagcggcagcg |
| acid sequence | | ggagcggaaccgattacacgctcactatttcctcactgcaacccgagga |
| | | tttcgctgtgtacttctgccaacaaggaaacaccctgccttataccttc |
| | | ggacagggtacaaagctggagattaagggaggagggggctccggcggcg |
| | | ggggcagcgggggcggcggaagccaggtccagctgcaggaatccggtcc |
| | | gggactcgtgaagccctccgaaactctctcccttacgtgcaccgtgtca |
| | | ggggtgtccctgccggactacggagtgtcctggattcggcaacctccgg |
| | | ggaagggactggagtggatcggagtgatctggggctccgaaactaccta |
| | | ctaccagtcatcattgaagtcaagagtgaccatttcgaaggacaacagc |
| | | aagaaccaggtgtcccttaaactgtccagcgtgaccgcggcggatactg |
| | | ccgtctactactgcgccaagcactattactacggcggaagctatgcgat |
| | | ggactactggggacagggcaccttggtcactgtgtcctccggaggggga |
| | | ggctccggtggcggcggctctggaggaggagggtccggcggaggaggat |
| | | cggaagtgcagctccaacagtcaggaccaggactcgtcaaaccctccca |
| | | aaccctcagccttacttgtgccatttccggggattccgtgtcgagcaat |
| | | tccgccgcctggaactggatcaggcagtccccgtcgcgcgggctcgaat |
| | | ggctgggacgcacttactaccggtccaagtggtacaacgactacgccgt |
| | | cagcgtgaagtcgcggatcaccattaaccccgacacctccaagaaccag |
| | | ttcagcctccaactgaactccgtgacccctgaggataccgcggtctact |
| | | attgtgcccgggacctgggttggattgccgtggccgggaccttcgatta |
| | | ctggggccagggaactctcgtcaccgtgtcctcgggagggggtggctca |
| | | gggggtggtggatcgggtggtggcggctcccagtccgctctgactcagc |
| | | ccgcgtccgtgtccggttccccgggacagtcgatcacaatcagctgcac |
| | | tggcacctcctccgacgtcggcgggtacaactacgtgtcgtggtaccaa |
| | | cagcaccctggaaaagccccgaagctgatgatctacgacgtgtccaaga |
| | | ggccaagcggagtgtcaaatcgcttttccggctcgaagtcgggaaacac |
| | | cgccagcctgactatctcgggactgcaggccgaggacgaggccgactac |
| | | tactgctcgtcttacacctcctcatccttgaaccacgtgttcggaaccg |
| | | gaaccaaggtcaccgtgctgact |
| antiCD19- | 1310 | gaaatcgtgatgacccagtcccccgcaaccctgtccctgagcccgggcg |
| 4G4S- | | aaagagctaccctgtcgtgccgggcgtcgcaggacatctccaagtacct |
| antiCD22 | | gaactggtaccagcagaagcccggccaggcaccgagactgctgatctac |
| CAR nucleic | | cacactagccgcctgcattccggtatccccgcacggttcagcggcagcg |
| acid sequence | | ggagcggaaccgattacacgctcactatttcctcactgcaacccgagga |
| | | tttcgctgtgtacttctgccaacaaggaaacaccctgccttataccttc |
| | | ggacagggtacaaagctggagattaagggaggagggggctccggcggcg |
| | | ggggcagcgggggcggcggaagccaggtccagctgcaggaatccggtcc |
| | | gggactcgtgaagccctccgaaactctctcccttacgtgcaccgtgtca |
| | | ggggtgtccctgccggactacggagtgtcctggattcggcaacctccgg |
| | | ggaagggactggagtggatcggagtgatctggggctccgaaactaccta |
| | | ctaccagtcatcattgaagtcaagagtgaccatttcgaaggacaacagc |
| | | aagaaccaggtgtcccttaaactgtccagcgtgaccgcggcggatactg |
| | | ccgtctactactgcgccaagcactattactacggcggaagctatgcgat |
| | | ggactactggggacagggcaccttggtcactgtgtcctccggaggggga |
| | | ggctccggtggcggcggctctggaggaggagggtccggcggaggaggat |
| | | cggaagtgcagctccaacagtcaggaccaggactcgtcaaaccctccca |
| | | aaccctcagccttacttgtgccatttccggggattccgtgtcgagcaat |
| | | tccgccgcctggaactggatcaggcagtccccgtcgcgcgggctcgaat |
| | | ggctgggacgcacttactaccggtccaagtggtacaacgactacgccgt |
| | | cagcgtgaagtcgcggatcaccattaaccccgacacctccaagaaccag |
| | | ttcagcctccaactgaactccgtgacccctgaggataccgcggtctact |
| | | attgtgcccgggacctgggttggattgccgtggccgggaccttcgatta |
| | | ctggggccagggaactctcgtcaccgtgtcctcgggagggggtggctca |
| | | gggggtggtggatcgggtggtggcggctcccagtccgctctgactcagc |
| | | ccgcgtccgtgtccggttccccgggacagtcgatcacaatcagctgcac |
| | | tggcacctcctccgacgtcggcgggtacaactacgtgtcgtggtaccaa |
| | | cagcaccctggaaaagccccgaagctgatgatctacgacgtgtccaaga |
| | | ggccaagcggagtgtcaaatcgcttttccggctcgaagtcgggaaacac |
| | | cgccagcctgactatctcgggactgcaggccgaggacgaggccgactac |
| | | tactgctcgtcttacacctcctcatccttgaaccacgtgttcggaaccg |
| | | gaaccaaggtcaccgtgctgactaccactaccccagcaccgaggccacc |
| | | caccccggctcctaccatcgcctcccagcctctgtccctgcgtccggag |
| | | gcatgtagacccgcagctggtggggccgtgcatacccggggtcttgact |
| | | tcgcctgcgatatctacatttgggcccctctggctggtacttgcggggt |
| | | cctgctgctttcactcgtgatcactctttactgtaagcgcggtcggaag |
| | | aagctgctgtacatctttaagcaacccttcatgaggcctgtgcagacta |
| | | ctcaagaggaggacggctgttcatgccggttcccagaggaggaggaagg |
| | | cggctgcgaactgcgcgtgaaattcagccgcagcgcagatgctccagcc |
| | | tacaagcaggggcagaaccagctctacaacgaactcaatcttggtcgga |
| | | gagaggagtacgacgtgctggacaagcggagaggacgggacccagaaat |
| | | gggcgggaagccgcgcagaaagaatccccaagagggcctgtacaacgag |
| | | ctccaaaaggataagatggcagaagcctatagcgagattggtatgaaag |
| | | gggaacgcagaagaggcaaaggccacgacggactgtaccagggactcag |
| | | caccgccaccaaggacacctatgacgctcttcacatgcaggccctgccg |
| | | cctcgg |

[1343] In some embodiments, the antigen binding domain comprises a HC CDR1, a HC CDR2, and a HC CDR3 of any heavy chain binding domain amino acid sequences listed in Table 28. In embodiments, the antigen binding domain further comprises a LC CDR1, a LC CDR2, and a LC CDR3. In embodiments, the antigen binding domain comprises a LC CDR1, a LC CDR2, and a LC CDR3 of any light chain binding domain amino acid sequences listed in Table 28.

[1344] In some embodiments, the antigen binding domain comprises one, two or all of LC CDR1, LC CDR2, and LC CDR3 of any light chain binding domain amino acid sequences listed in Table 28, and one, two or all of HC CDR1, HC CDR2, and HC CDR3 of any heavy chain binding domain amino acid sequences listed in Table 28.

[1345] In some embodiments, the CDRs are defined according to the Kabat numbering scheme, the Chothia numbering scheme, or a combination thereof.

[1346] The bispecific CD19-CD22 and CD22-CD19 constructs described above were tested in an NFAT assay, as described in the Examples below. As controls, an anti-CD19 alone CAR and an anti-CD22 alone CAR were used. The results of this assay are shown in FIG. 14. The data indicated that both anti-CD19 and anti-CD22 scFvs are active against their targets.

### EXAMPLES

[1347] The invention is further described in detail by reference to the following experimental examples. These examples are provided for purposes of illustration only, and are not intended to be limiting unless otherwise specified. Thus, the invention should in no way be construed as being limited to the following examples, but rather, should be construed to encompass any and all variations which become evident as a result of the teaching provided herein.

[1348] Without further description, it is believed that one of ordinary skill in the art can, using the preceding description and the following illustrative examples, make and utilize the compounds of the present invention and practice the claimed methods. The following working examples specifically point out various aspects of the present invention, and are not to be construed as limiting in any way the remainder of the disclosure.

### Example 1: CD19 CAR T Cells for Use in Treating Multiple Myeloma

[1349] Even with current regimens of chemotherapy, targeted therapies, and autologous stem cell transplant, myeloma is considered an incurable disease. The present example describes treating multiple myeloma (MM) with autologous T cells directed to CD19 with a chimeric antigen receptor (lentivirus/CD19:4-1BB:CD3zeta; also known as “CART19” or CTL019). This example demonstrates that CD19-directed CAR therapies have the potential to establish deep, long-term durable remissions based on targeting the myeloma stem cell and/or tumor cells that express very low (undetectable by most methods) levels of CD19.

[1350] In treating a patient with an aggressive secondary plasma cell leukemia, we found that CART19 administered two days after a salvage autologous stem cell transplant resulted in rapid clearance of plasma cell leukemia and a very good partial response in a patient who had progressed through multiple lines of chemotherapy. This patient was transfusion-dependent for months prior to the treatment; at two months after the treatment, she has recovered her blood counts (with normal-range platelet counts and white blood cell counts) and has not required transfusions since she was discharged from the hospital from her treatment.

[1351] Because myeloma cells do not naturally express CD19, the finding that CART19 treatment induced a rapid and significant tumor response in this tumor was surprising. Without wishing to be bound by a particular theory, it was reasoned that CART19 could be used to treat myeloma because: (1) while myeloma cells are traditionally thought to be negative for CD19 expression by flow cytometry, there are data indicating that myeloma cells may express very low levels of CD19, such that expression is detectable by RNA but not by flow cytometry or immunohistochemistry; and (2) the concept of targeting the clonotypic B cell, which is thought to be the cancerous stem cell that gives rise to multiple myeloma, and is particularly resistant to chemotherapy. There is a clonal relationship between B cells and myeloma tumor cells, but traditional myeloma therapy is aimed at the malignant plasma cells rather than B cells. CART19 for treating myeloma therefore targets a different cell population than most myeloma therapies.

[1352] In our single patient experience, the patient had circulating plasma cells, and we were able to test her tumor cells for the expression of CD19. Approximately 1-2% of her tumor cells expressed the CD19 antigen. Thus, it was reasoned that CART19 may have a direct effect on a very small population of her tumor cells; a very good partial response, though would not have been predicted based on targeting only the very small population of CD19+ tumor cells.

[1353] In this case, CART19 was administered following autologous stem cell transplant rescue after high-dose melphalan. Although this is a standard therapy in myeloma, it is not curative. Furthermore, this patient had previously undergone tandem autologous stem cell transplants and relapsed early (<6 months) after transplant. Without wishing to be bound by a particular theory, use of CART19 cells as described in the present example may have a non-overlapping mechanism in the treatment of myeloma when combined with a salvage autologous stem cell transplant.

[1354] Ten additional multiple myeloma patients will be treated with CART19 in a Phase I trial, and at least three patients have been treated to date.

### Dose Rationale and Risks/Benefits

[1355] We have chosen to use flat dosing via the intravenous route of administration for this protocol. The primary objective of this protocol was to test the safety and feasibility of administering CART-19 cells to patients with multiple myeloma. The primary toxicities that were anticipated are (I) cytokine release when the CARs encounter their surrogate CD 19 antigen on malignant or normal B cells; (2) depletion of normal B cells, similar to rituximab therapy; (3) steroid-responsive skin and gastrointestinal syndromes resembling graft-versus-host disease as has been seen previously when expanded/costimulated autologous T-cells have been coupled with ASCT for MM. A theoretical concern was whether transformation or uncontrolled proliferation of the CART-19 T cells might occur in response to high levels of CD 19. This was less a concern in this application compared to another study of CLL patients, as the burden of clonotypic B-cells in MM is expected to be far lower than the burden of malignant B-cells in the refractory CLL patients treated on that study.

### Dose Rationale

[1356] With the first 3 patients, we have observed clinical activity at doses ranging from 1.4×10⁷ to 1.1×10⁹ CART-19 cells. This observation demonstrates, at least in the first 3 patients treated, that there is not an obvious dose response relationship. A complete response was observed in patients administered with two log fold difference in dose. Thus, unlike standard drugs that are metabolized, CAR T cells can have a wide dose response range. This is most likely because the CAR T cells are able to proliferate extensively in the patients. We therefore set a dose range of 1-5×10⁸ CART-19 cells for infusion. In this single-patient study offered on a compassionate use basis, the patient was offered up to 5×10⁸ CART19 cells, with no lower dose limit. For the ten patient trial, patients will be offered 1-5×10⁷ CART-19 cells.

### General Design

[1357] This was single patient-study offered on a compassionate use basis; it was modeled after a Phase I study to determine if the infusion of autologous T cells transduced to express CART-19 is safe. The primary goals of the study were to determine the safety, tolerability and engraftment potential of CART-19 T cells in patients undergoing salvage ASCT after early relapse following first ASCT. The protocol consists of an open label pilot study.

[1358] At entry subjects will undergo a bone marrow biopsy and routine laboratory and imaging assessment of their MM. Eligible subjects will undergo steady-state apheresis to obtain large numbers of peripheral blood mononuclear cells (PBMC) for CART-19 manufacturing. The T cells will be purified from the PBMC, transduced with TCRζ/4-1BB lentiviral vector, expanded in vitro and then frozen for future administration. The number of patients who have inadequate T cell collections, expansion or manufacturing compared to the number of patients who have T cells successfully manufactured will be recorded; feasibility of product manufacturing is not expected to be problematic in this patient population.

[1359] Subjects will generally have had adequate peripheral blood stem cells remaining stored from the mobilization/collection performed in preparation for their first ASCT to conduct two additional ASCT. Those who do not will undergo a second mobilization/collection procedure either before or after their steady-state apheresis with a regimen according to the treating physician's preference. Approximately two weeks after the initial leukapheresis, subjects will be admitted to the hospital and receive high-dose melphalan (day −2) followed by infusion of autologous stem cells two days later (day 0), and all subjects will receive infusion of CART-19 cells twelve to fourteen days later (day +12-14). Up to 10 patients will be enrolled.

[1360] All subjects will have blood tests to assess safety, and engraftment and persistence of the CART-19 cells at regular intervals through week 4 of the study. At day +42 and day +100, subjects will undergo bone marrow aspirates/biopsies to assess the bone marrow plasma cell burden and trafficking of CART-19 cells to the bone marrow. A formal response assessment will be made at day 100 according to International Myeloma Working Group (IMWG) criteria136, and TTP will be monitored according to routine clinical practice for patients with multiple myeloma. The main efficacy outcome measured in this study will be a comparison of TTP after a patient's initial ASCT to TTP after the ASCT on this study.

[1361] As the primary endpoint of this study is safety and feasibility of infusion of CART-19 cells with ASCT, the study will employ an early stopping rule. Briefly, if less than 2 severe, unexpected adverse events occur among the first five subjects treated, the study will then accrue an additional five subjects towards a target enrollment of 10. We will observe treated subjects for 40 days after CART-19 infusion (i.e., through the first official response assessment at day 42) before enrolling a subsequent subject until five subjects have been enrolled and so observed. For treatment of the second group of five patients, no waiting period will be required between subjects.

[1362] Following the 6 months of intensive follow-up, subjects will be evaluated at least quarterly for two years with a medical history, physical examination, and blood tests. Following this evaluation, subjects will enter a roll-over study for annual follow-up by phone and questionnaire for up to additional thirteen years to assess for the diagnosis of long-term health problems, such as development of new malignancy.

### Primary Study Endpoints

[1363] This pilot trial is designed to test the safety and feasibility of the autologous T cells transduced with the CD19 TCRζ/4-1BB in patients undergoing salvage ASCT for MM following early relapse after first ASCT.

Primary safety and feasibility endpoints include:

[1364] Occurrence of study-related adverse events, defined as NCJ CTC 2: grade 3 signs/symptoms, laboratory toxicities and clinical events that are possibly, likely or definitely related to study treatment at any time from the infusion until week 24. This will include infusional toxicity and any toxicity possibly related to the CART-19 cells including but not limited to:
[1365] a. Fevers
[1366] b. Rash
[1367] c. Neutropenia, thrombocytopenia, anemia, marrow aplasia
[1368] d. Hepatic dysfunction
[1369] e. Pulmonary infiltrates or other pulmonary toxicity
[1370] f. GVHD-like syndromes affecting gastrointestinal tract or skin.

[1371] Feasibility to manufacture CART-19 cells from patient apheresis products. The number of manufactured products that do not meet release criteria for vector transduction efficiency, T cell purity, viability, sterility and tumor contamination will be determined.

[1372] The depth and duration of response following autologous stem cell transplant with CART19 will be compared to the depth and duration of response that each patient initially achieved following standard autologous stem cell transplant.

### Subject Selection and Withdrawal

### Inclusion Criteria

[1373] Subjects must have undergone a prior ASCT for MM and have progressed within 365 days of stem cell infusion. Subjects who have undergone two prior ASCTs as part of a planned tandem ASCT consolidation regimen are eligible. Progression will be defined according to IMWG criteria for progressive disease or, for patients who attained CR or sCR after initial ASCT, criteria for relapse from CR (Durie et al. Leukemia 2006; 20(9):1467-1473). N.B.: There is no requirement that patients must enroll within 365 days of prior ASCT, and patients may be treated with other agents, including experimental agents, following relapse/progression after prior ASCT before enrollment on this study.

[1374] Subjects must have signed written, informed consent.

[1375] Subjects must have adequate vital organ function to receive high-dose melphalan as defined by the following criteria, measured within 12 weeks prior to the date of melphalan infusion: a. Serum creatinine ≤2.5 or estimated creatinine clearance ≥30 ml/min and not dialysis-dependent. b. SGOT≤3× the upper limit of normal and total bilirubin ≤2.0 mg/dl (except for patients in whom hyperbilirubinemia is attributed to Gilbert's syndrome). c. Left ventricular ejection fraction (LVEF)≥45% or, if LVEF is <45%, a formal evaluation by a cardiologist identifying no clinically significant cardiovascular function impairment. LVEF assessment must have been performed within six weeks of enrollment. d. Adequate pulmonary function with FEV1, FVC, TLC, DLCO (after appropriate adjustment for lung volume and hemoglobin concentration)≥40% of predicted values. Pulmonary function testing must have been performed within six weeks of enrollment.

[1376] Subjects must have an ECOG performance status of 0-2, unless a higher performance status is due solely to bone pain.

### Exclusion Criteria

[1377] Subjects must not:
[1378] Have any active and uncontrolled infection.
[1379] Have active hepatitis B, hepatitis C, or HIV infection.

[1380] Any uncontrolled medical disorder that would preclude participation as outlined.

### Treatment Regimen

[1381] Therapy for Relapsed/Progressive Multiple Myeloma

[1382] Patients may receive, prior to enrollment, therapy for relapsed/progressive multiple myeloma according to the preference of their treating physicians. Therapy may continue upon enrollment.

[1383] Patients must stop all therapy for two weeks prior to apheresis and for two weeks prior to high-dose melphalan. If more than two weeks are expected to lapse between apheresis and high-dose melphalan, patients may resume therapy after apheresis at the discretion of their treating physicians.

[1384] High-Dose Melphalan (Day −2)

[1385] Patients will be admitted to the hospital on day −3 or −2 and will undergo examination by the attending physician and routine laboratory tests, which will include monitoring parameters for tumor lysis syndrome, prior to commencement of the treatment protocol. Blood for MM monitoring laboratory tests (SPEP, quantitative immunoglobulins, and serum free light chain analysis), will be drawn prior to initiation of therapy if such tests had not been drawn within 7 days of admission.

[1386] High-dose therapy will consist of melphalan at a dose of 200 mg/m² administered intravenously over approximately 20 minutes on day −2. The dose of melphalan will be reduced to 140 mg/m² for patients >70 years of age or for patients of any age whom, at the discretion of the treating physician, may not tolerate a dose of 200 mg/m² All patients will receive standard anti-emetic prophylaxis, which may include dexamethasone, and standard antibiotic prophylaxis.

[1387] Stem-Cell Re-Infusion (Day 0)

[1388] Stem cell infusion will take place on day 0, at least 18 hours after the administration of the high-dose melphalan. Stem cells will be infused intravenously over approximately 20-60 minutes following premedication according to standard institutional practice. At least 2×10⁶ CD34+ progenitors/kg body weight should be infused. In addition, at least 1×10⁶ CD34+ progenitors/kg body weight should be available as a back-up stem-cell product to be infused in the event of delayed engraftment or late graft failure. G-CSF should be administered SQ beginning on day +5, dosed according to standard institutional practice. Other supportive care measures such as transfusion support will be done in accordance with standard institutional guidelines.

[1389] CART19 Cell Infusion (Day +12-14)

[1390] A single dose of CART-19 transduced T cells will be given consisting of up to 5×10⁷ CART-19 cells. The minimal acceptable dose for infusion of cells transduced with the CD19 TCRζ4-1BB vector in this single-patient protocol is 1×10⁷. CART-19 cells will be given as a single dose by rapid i.v. infusion on day +12-14 after stem cell infusion. If patient fails to meet any of the inclusion criteria described herein in the 12-14 day window, the CART-19 infusion may be delayed beyond day +12-14 until the criteria is satisfied.

[1391] Maintenance Lenalidomide

[1392] Subjects who received and tolerated maintenance lenalidomide after their first ASCT will re-initiate lenalidomide maintenance therapy at approximately day +100, assuming there are no contraindications in the judgment of the treating physician. The starting dose will be 10 mg daily unless prior experience dictates an alternative starting dose for a particular patient. Maintenance therapy will continue until disease progression or intolerance.

[1393] Preparation and Administration of Study Drug

[1394] The CART-19 T cells are prepared in the CVPF and are not released from the CVPF until FDA approved release criteria for the infused cells (e.g., cell dose, cell purity, sterility, average copy number of vectors/cell, etc.) are met. Upon release, the cells are taken to the bedside for administration.

[1395] Cell thawing. The frozen cells will be transported in dry ice to the subject's bedside. The cells will be thawed at the bedside using a water bath maintained at 36° C. to 38° C. The bag will be gently massaged until the cells have just thawed. There should be no frozen clumps left in the container. If the CART-19 cell product appears to have a damaged or the bag to be leaking, or otherwise appears to be compromised, it should not be infused and should be returned to the CVPF as specified below.

[1396] Premedication. Side effects following T cell infusions include transient fever, chills, and/or nausea; see Cruz et al. for review (Cytotherapy 2010; 12(6):743-749). It is recommended that the subject be pre-medicated with acetaminophen and diphenhydramine hydrochloride prior to the infusion of CART-19 cells. These medications may be repeated every six hours as needed. A course of non-steroidal anti-inflammatory medication may be prescribed if the patient continues to have fever not relieved by acetaminophen. It is recommended that patients not receive systemic corticosteroids such as hydrocortisone, prednisone, methylprednisolone or dexamethasone at any time, except in the case of a life-threatening emergency, since this may have an adverse effect on T cells.

[1397] Febrile reaction. In the unlikely event that the subject develops sepsis or systemic bacteremia following CAR T cell infusion, appropriate cultures and medical management should be initiated. If a contaminated CART-19 T cell product is suspected, the product can be retested for sterility using archived samples that are stored in the CVPF.

[1398] Administration. The infusion will take place in an isolated room in Rhoads, using precautions for immunosuppressed patients. The transduced T cells will be administered by rapid intravenous infusion at a flow rate of approximately 10 mL to 20 ml per minute through an 18-gauge latex free Y-type blood set with a 3-way stopcock. The duration of the infusion will be based on the total volume to be infused and the recommended infusion rate. Each infusion bag will have affixed to it a label containing the following: “FOR AUTOLOGOUS USE ONLY.” In addition the label will have at least two unique identifiers such as the subject's initials, birth date, and study number. Prior to the infusion, two individuals will independently verify all this information in the presence of the subject and so confirm that the information is correctly matched to the participant.

[1399] Emergency medical equipment (i.e., emergency trolley) will be available during the infusion in case the subject has an allergic response, or severe hypotensive crisis, or any other reaction to the infusion. Vital signs (temperature, respiration rate, pulse, and blood pressure) will be taken before and after infusion, then every 15 minutes for at least one hour and until these signs are satisfactory and stable. The subject will be asked not to leave until the physician considers it is safe for him or her to do so.

### Packaging

[1400] Infusion will be comprised of a single dose of 1-5×10⁷ CART 19-transduced cells, with a minimal acceptable dose of 1×10⁷ CART-19 cells for infusion. Each bag will contain an aliquot (volume dependent upon dose) of cryomedia containing the following infusible grade reagents (% v/v): 31.25% plasmalyte-A, 31.25% dextrose (5%), 0.45% NaCl, up to 7.5% DMSO, 1% dextran 40, 5% human serum albumin.

### Apheresis

[1401] A large volume (12-15 liters or 4-6 blood volumes) apheresis procedure is carried out at the apheresis center. PBMC are obtained for CART-19 during this procedure. From a single leukapheresis, the intention is to harvest at least 5×10⁹ white blood cells to manufacture CART-19 T cells. Baseline blood leukocytes for FDA look-back requirements and for research are also obtained and cryopreserved. The cell product is expected to be ready for release approximately 2-4 weeks later. Flow cytometry lymphocyte subset quantitation, including CD19 and CD20 B cell determination. Baseline assessment is made for human anti-VSV-G and anti-murine antibody (HAMA). If a subject has previously had an adequate apheresis collection banked according to current Good Manufacturing Practices at the Clinical Cell and Vaccine Production Facility these cells may be used as the source of cells for CART-19 manufacturing. Using a banked apheresis product would avert the expense, time, and risk to the subject of undergoing an additional apheresis collection.

### Cytoreductive Chemotherapy

[1402] The lymphodepleting chemotherapy will be high-dose melphalan as described herein.

### CART-19 Infusion

[1403] Infusion will begin on day +12-14 after stem-cell reinfusion.

[1404] On day +12-14 prior to the first infusion, patients will have a CBC with differential, and assessment of CD3, CD4 and CD8 counts since chemotherapy is given in part to induce lymphopenia.

[1405] The first dose will be administered using a single dose. The cells are thawed at the patient's bedside. The thawed cells will be given at as rapid an infusion rate as tolerated such that the duration of the infusion will be approximately 10-15 minutes. In order to facilitate mixing, the cells will be administered simultaneously using a Y-adapter. Subjects will be infused and premedicated as described herein. Subjects' vital signs will be assessed and pulse oxymetry done prior to dosing, at the end of the infusion, and every 15 minutes thereafter for 1 hour and until these are stable and satisfactory. A blood sample for determination of a baseline CART-19 level is obtained any time prior to the first infusion and 20 minutes to 4 hours after each infusion (and sent to TCSL).

[1406] Patients experiencing toxicities related to high-dose melphalan will have their infusion schedule delayed until these toxicities have resolved. The specific toxicities warranting delay of T cell infusions include: 1) Pulmonary: Requirement for supplemental oxygen to keep saturation greater than 95% or presence of radiographic abnormalities on chest x-ray that are progressive; 2) Cardiac: New cardiac arrhythmia not controlled with medical management 3) Hypotension requiring vasopressor support. 4) Active Infection: Positive blood cultures for bacteria, fungus, or virus within 48-hours of T cell infusion.

### Management of Toxicity

[1407] Uncontrolled T cell proliferation. Toxicity associated with allogeneic or autologous T cell infusions has been managed with a course of pharmacologic immunosuppression. T body associated toxicity has been reported to respond to systemic corticosteroids. If uncontrolled T cell proliferation occurs (grade 3 or 4 toxicity related to CART-19 cells), subjects may be treated with corticosteroids. Subjects will be treated with pulse methylprednisolone (2 mg/kg i.v. divided q8 hr×2 days), followed by a rapid taper.

[1408] In addition, based on the observations of subjects treated on another protocol, there is some concern for macrophage activation syndrome (MAS), though the CD 19+ tumor burden is expected to be much lower in patients with myeloma than in patients with CLL. Treatment and timing of treatment of this toxicity will be at the discretion of the patient's physician and the study investigator. Suggested management might include: if the subject has a fever greater than 101° F. that lasts more than 2 consecutive days and there is no evidence of infection (negative blood cultures, CXR or other source), tocilizumab 4 mg/kg can be considered. The addition of corticosteroids and anti-TNF therapy can be considered at the physician's discretion.

[1409] B cell depletion. It is possible that B cell depletion and hypogammaglobulinemia will occur. This is common with anti-CD20 directed therapies. In the event of clinically significant hypogammaglobulinemia (i.e. systemic infections), subjects will be given intravenous immunoglobulin (IVIG) by established clinical dosing guidelines to restore normal levels of serum immunoglobulin levels, as has been done with Rituximab.

[1410] Primary graft failure. Primary graft failure (i.e., non-engraftment) may be more common after second ASCT compared to first ASCT. Eligibility criteria stipulate that sufficient stem cells must be available for rescue reinfusion at the discretion of the treating physician in the event of primary graft failure.

### Results

[1411] Three treatment-refractory, advanced multiple myeloma patients have now been treated with CTL019 in this ongoing trial. Results for two of these patients show that both have had substantial anti-tumor effects from the CTL019 therapy based on the primary efficacy assessment at the three-month time-point. The third patient has not yet reached the three-month time point. The results for the two patients are described in more detail below.

[1412] The first myeloma patient has completed her +100 day response assessment and she had a very good response to the CART19 therapy. The following tests were performed with the following results:
[1413] SPEP/immunofixation: negative
[1414] urine immunofixation: faint unmeasurable kappa light chain band on her immunofixation (also present at day 38, so not new)
   Otherwise, the patient meets the criteria for stringent complete remission including:
[1415] serum free light chain ratio: normal
[1416] bone marrow biopsy: negative
[1417] IgA immunophenotyping: IgA is below the limit of detection

[1418] Other than the faint unmeasurable kappa light chain result from urine immunofixation, the patient met all criteria for “stringent complete remission”. The summary of the plasma cell immunophenotyping at 3 time points (day −2, day +38, day +103) is shown in FIG. 8, and demonstrates that the patient's IgA is below the limit of detection. The summary shows heavy myeloma burden at day −2 and none detectable at day +38 and +103, which classifies the patient as “MRD negative” by flow analysis. At day +103, the summary shows recovery of normal, polyclonal, CD19+ plasma cells and B cells. The patient had no symptoms of disease or therapy and is functioning like a normal person.

[1419] The second patient treated has not yet reached the +100 day time point. However, at this time point, she is doing well but it is too early to determine the effect of the CTL019 infusion.

### Example 2: CAR19 T Cell Therapy for Hodgkin Lymphoma

[1420] CAR19 T cell therapy can also be used to treat Hodgkin lymphoma (HL). Hodgkin lymphoma is characterized by the presence of malignant Hodgkin Reed-Sternberg (HRS) cells that are derived from clonal germinal center B cells. There are several factors that indicate the therapeutic efficacy of CAR19 T cell therapy for HL. CD19 staining of HL tumors shows CD19-expressing (CD19⁺) cells within the tumor and tumor microenvironment (FIG. 2). A study has shown that a clonal B cell population (CD20⁺CD27⁺ ALDH⁺) that expresses CD19 is responsible for the generation and maintenance of Hodgkin lymphoma cell lines, and also circulates in the blood of most HL patients (Jones et al., Blood, 2009, 113(23):5920-5926). This clonal B cell population has also been suggested to give rise to or contribute to the generation of the malignant HRS cells. Thus, CART19 therapy would deplete this B cell population that contributes to tumorigenesis or maintenance of tumor cells. Another study showed that B cell depletion retards solid tumor growth in multiple murine models (Kim et al., J Immunotherapy, 2008, 31(5):446-57). In support of the idea that depletion of B cells in the HL tumor microenvironment results in some anti-tumor effect, current therapies, such as rituxan, are being clinically tested for targeting and depletion of tumoral B cells in HL (Younes et al., Blood, 2012, 119(18):4123-8). De novo carcinogenesis related to chronic inflammation has also been shown to be B-cell dependent (de Visser, et al., Cancer Cell, 2005, 7(5):411-23). The results from these studies indicate that targeting of the B cell population, particularly in the HL tumor microenvironment, would be useful for treating HL, by reducing or inhibiting disease progression or tumor growth.

[1421] In addition, normal CD19-expressing B cells also infiltrate the tumor microenvironment in HL. Previous studies with CART19 therapy in CLL and ALL (e.g., described in Examples 4 and 5) show that CART19 exposure to CD19+ targets leads to cytokine production and macrophage production. Thus, modulation of the HL tumor microenvironment from a pro-tumor microenvironment to an anti-tumor microenvironment can be achieved by infusing CART19 to interact with normal CD19+ B cells present in the HL. For example, CART19 exposure to CD19-expressing targets causes cytokine production, e.g., inflammatory cytokines, that promote anti-tumor activity through the expansion of cytotoxic T cells, activation of macrophages, and recruitment of other immune effector cells with various functions that inhibit tumor growth, such as leukocytes, macrophages, and antigen-presenting cells. Because the target CD19+ B cells may not be malignant (e.g., normally circulating B cells), a transient rather than protracted CART19 effect may be preferred for modulation of the tumor microenvironment.

[1422] A study to examine the therapeutic efficacy of CART19 therapy in HL patients can be performed as described below (FIG. 3). The study will also assess the safety and tolerability of CART19 in HL subjects, and determine the effect of CART19 cells on the HL tumor microenvironment.

[1423] 8 patients with classical HL are treated in this study. Patients are of all ages, though separate protocols for drug delivery can be established for pediatric and adult patients. Patients in this study have no available potentially curative treatment options (such as autologous (ASCT) or allogeneic stem cell transplantation), or are not suitable for such curative treatment options. For example, patients can be any of the following: PET+ after salvage chemotherapy, PET+ after treatment with brentuximab, or PET+ after ASCT with or without prior brentuximab exposure. The patients will have a limited prognosis (several months to less than or equal to 2 year expected survival) with currently available therapies. And finally, the patients will not have received anti-CD20 antibody therapy. Patients are excluded due to lack of feasibility, e.g., if the patient has insufficient numbers of T cells for 6 infusions of CART19.

[1424] An mRNA CAR19 is produced by in vitro transcription. The CAR19 mRNA is electroporated into donor T cells, and the resulting cells are expanded and stimulated by incubation with CD3/CD28 beads. Dosages containing 1×10⁸-5×10⁸ RNA-electroporated CAR19 T cells are delivered to the patient three times a week for two weeks (e.g., at day 0, 2, 4, 7, 9 and 11). The overall response rate will be assessed by clinical, CT, and PET scanning at 1 month after treatment. Response and survival will be monitored monthly for the first 6 months, then every 3 months until 2 years after the first CART19 infusion (day 0). Monitoring techniques include biopsy of the tumor or lymph node (e.g., for immunohistochemical analysis and/or RNA for gene expression profiling) and PET scanning before and after CART19 treatment. For example, the effect of the CART19 cells on the HL tumor microenvironment are analyzed by comparing the results of gene expression profiling performed on accessible lymph node biopsies from selected patients before treatment and approximately one week after treatment (or the appropriate time after treatment to allow for alteration of cellular phenotype). To assess the safety and tolerability of CART19 treatment, the frequency and severity of adverse events are reported, including the frequency of cytokine release syndrome (CRS) and macrophage activation syndrome (MAS).

[1425] Chemotherapy may be administered concurrently with CART19 treatment. The first dose of CART19 can be preceded by lymphodepleting chemotherapy, e.g., cytoxan.

### Example 3: Non-Responder Subset of CLL Patients Exhibit Increased Expression of Immune Checkpoint Inhibitor Molecules

[1426] In this study, CART19 cells from clinical manufacture from 34 CLL patients were assessed for expression of immune checkpoint inhibitor molecules, such as PD-1, LAG3, and TIM3. The response of this cohort to CART19 was known and hence a correlation between response and biomarker expression patterns could be assessed.

[1427] Manufactured CART19 cells from CLL patients with different responses to CART therapy were analyzed by flow cytometry to determine the expression of CAR and the immune checkpoint inhibitor molecules PD-1, LAG3, and TIM3. The CART19 cells were from: healthy donors (HD) (n=2); CLL patients that responded to CART therapy (CR) (n=5); CLL patients that partially responded to CART therapy (PR) (n=8); CLL patients that did not respond to CART therapy (NR) (n=21). Cells were stained with fluorescently labeled antibodies that specifically recognize CD3, CD4, CD8, CD27, CD45RO, the CAR19 molecule, and immune checkpoint molecules PD-1, LAG3, and TIM3, according to standard methods for flow cytometry analysis known in the art. Expression of each marker, e.g., CD4+, CD8+, etc., was determined by flow cytometry analysis software, and subpopulations (e.g., CD4+ T cells, CD8+ T cells, or CAR19-expressing T cells) were further analyzed for the expression of immune checkpoint molecules PD-1, LAG3, and TIM3.

[1428] An example of the flow cytometry profiles analysis used to determine surface marker expression is shown in FIGS. 4A and 4B. T cells expressing CD4 were determined using flow cytometry, and were further analyzed for CAR19 and PD-1 expression, such that the x-axis of the profiles indicate CAR19 expression (the top left (Q5) and bottom left (Q8) quadrants show the CAR19-negative CD4+ cells, while the top right (Q6) and bottom right (Q7) quadrants show the CAR19-expressing CD4+ cells) and the y-axis shows PD-1 expression (the bottom left (Q8) and right (Q7) quadrants show the PD-1 negative CD4+ cells and the top left (Q5) and right (Q6) quadrants show the PD-1-expressing CD4+ cells). In the CD4+ population from a CART responder, 44.7% of the CD4+ cells overall expressed PD-1, and about 22.3% of the CAR19-expressing cells were PD-1 positive, while 27.2% of CAR19-expressing cells were PD-1 negative (FIG. 4A). In contrast, in the CD4+ population from a non-responder, there was a significant decrease in CAR19-expressing cells overall (about 15.3% compared to the 49.5% in CR), with 14.7% of the CAR19-expressing cells being PD-1 positive while only 0.64% were PD-1 negative (FIG. 4B). Comparison between the profiles in FIG. 4A and FIG. 4B shows that a much higher percentage of the CD4+ cells from a non-responder express PD-1 (about 92.9%) compared to the CART responder (about 44.7%).

[1429] Using the methods and analysis described above, the percentage of PD-1 expressing (PD-1+) cells of the CD4+ population and the CD8+ population was determined for each patient in each response group. Non-responders were shown to have a greater percentage of PD-1+ cells in both the CD4+ (FIG. 4C) and CD8+ (FIG. 4D) populations compared to those that responded to CAR therapy (CR); the increase of average PD-1 percentage was statistically significant for both CD4+ and CD8+ populations. Partial responders (PR) exhibited higher percentages of PD-1+ cells than responders (CR) in both CD4+ (FIG. 4C) and CD8+ (FIG. 4D) populations.

[1430] Next, the percentage of PD-1 expressing (PD-1+) cells of the CAR19-expressing CD4+ population and the CAR19-expressing CD8+ population was determined for each patient in each response group. Similar analysis was performed as above, with the additional step of analyzing the CD4+ and CD8+ cells for CAR19-expression, and after identification of the CAR19-expressing cells, determining the percentage of cells with PD-1 expression from the populations of CAR19-expressing cells. A similar trend as that observed in the CD4+ and CD8+ overall populations was observed for the CAR19 expressing CD4+ and CD8+ populations: non-responders were shown to have a greater percentage of PD-1+ cells in both the CD4+ (FIG. 5A) and CD8+ (FIG. 5B) populations compared to those that responded to CAR therapy (CR); the increase of average PD-1 percentage was statistically significant for both CD4+ and CD8+ populations. Partial responders (PR) exhibited higher percentages of PD-1+ cells than responders (CR) in both CD4+ (FIG. 5A) and CD8+ (FIG. 5B) populations.

[1431] Further analysis was performed to determine the distribution of cells expressing PD-1, LAG3, and TIM3 from patients with different responses to CAR therapy. Representative cell profile analysis for PD-1, LAG3, and TIM3 expression in the CD4+ population is shown in FIG. 6. The cell populations were first analyzed for CD4+ and CD8+ expression. The CD4+ population (or CD8+ population, not shown) was then analyzed for PD-1 and CAR19 expression (FIG. 6, left profiles). As described previously, non-responders (NR) had a significantly increased percentage of cells that were PD-1+ overall compared to CART responders (CR) (about 92.9% PD-1 positive for NR compared to 44.7% PD-1 positive for CR). Moreover, in non-responders, CAR19-expressing cells were mostly PD-1 positive (14.7% PD-1 positive and CAR+ compared to 0.64% PD-1 negative and CAR+). Then the populations were analyzed for PD-1 and LAG3 co-expression (FIG. 6, middle profiles). Cells that expressed both PD-1 and LAG3 are shown in the top right quadrant (Q2). Non-responders had a significantly increased percentage of cells that expressed both immune checkpoint inhibitors, PD-1 and LAG3, compared to CART responders (67.3% compared to 7.31%). PD-1 expression was also analyzed with TIM3 expression. In FIG. 6, right profiles, the box indicates the cells that express both PD-1 and TIM3. Similar to the results obtained with PD-1 and LAG3, the non-responders had a significantly higher percentage of cells that expressed both immune checkpoint inhibitors, PD-1 and TIM3, compared to CART responders (83.3% compared to 28.5%). The percentage of PD-1 expressing cells (PD1+), PD-1 and LAG3-expressing cells (PD1+LAG3+), and PD-1 and TIM3-expressing cells (PD1+ TIM3+) was determined for each patient in each response group using the flow cytometry analysis as described above. Non-responders were shown to have an increased percentage of PD1+LAG3+ cells (FIG. 7A) and PD1+ TIM3+ cells (FIG. 7B) compared to CART responders that was statistically significant for both cell populations. Partial responders also showed an increased percentage of both cell populations compared to CART responders, with the averages being decreased compared to the non-responders.

[1432] These results indicate that patients that do not respond to CAR therapy exhibit increased expression of immune checkpoint inhibitors (e.g., PD-1, LAG3, and TIM3) compared to patients that respond or partially respond to CAR therapy. Thus, these results show that agents that inhibit or decrease expression of immune checkpoint inhibitors, e.g., PD-1, LAG3, or TIM3, may be useful for administration to patients receiving CAR therapy to prevent immune suppression through immune checkpoint pathways (e.g., mediated by PD-1, LAG3, or TIM3), thereby increasing the efficacy of the CAR-expressing cells.

### Example 4: Effects of mTOR Inhibition on Immunosenescence in the Elderly

[1433] The efficacy of mTOR inhibition on immunosenescence is described, e.g., in Example 1 of International Application WO/2015/073644, and the entirety of the application is herein incorporated by reference.

### Example 5: Enhancement of Immune Response to Vaccine in Elderly Subjects

[1434] The efficacy of mTOR inhibition on enhancing an immune response is described, e.g., in Example 2 of International Application WO/2015/073644, and the entirety of the application is herein incorporated by reference.

### Example 6: Low Dose mTOR Inhibition Increases Energy and Exercise

[1435] The effect of mTOR inhibition on energy and exercise is described, e.g., in Example 3 of International Application WO/2015/073644, and the entirety of the application is herein incorporated by reference.

### Example 7: P70 S6 Kinase Inhibition with RAD001

[1436] The effect of mTOR inhibition on P70 S6 kinase inhibition is described, e.g., in Example 4 of International Application WO/2015/073644, and the entirety of the application is herein incorporated by reference.

### Example 8: Exogenous IL-7 Enhances the Function of CAR T Cells

[1437] After adoptive transfer of CAR T cells, some patients experience limited persistence of the CAR T cells, which can result in suboptimal levels of anti-tumor activity. In this example, the effects of administration of exogenous human IL-7 is assessed in mouse xenograft models where an initial suboptimal response to CAR T cells has been observed.

[1438] Expression of the IL-7 receptor CD127 was first assessed in different cancer cell lines and in CAR-expressing cells. Two mantle cell lymphoma cell lines (RL and Jeko-1) and one B-ALL cell line (Nalm-6) were analyzed by flow cytometry for CD127 expression. As shown in FIG. 9A, out of the three cancer cell lines tested, RL was shown to have the highest expression of CD127, followed by Jeko-1 and Nalm-6. CART19 cells were infused into NSG mice and CD127 expression was assessed on the circulating CART19 cells by flow cytometry. As shown in FIG. 9B, CD127 is uniformly expressed on all circulating CART19 cells.

[1439] Next, the effect of exogenous IL-7 treatment on anti-tumor activity of CART19 cells was assessed in a lymphoma animal model. NSG mice were engrafted with a luciferase-expressing mantle cell line (RL luc) on Day 0 (DO), followed by treatment of CART19 cells on Day 6. The NSG mice were divided into groups, where one group received no CART19 cells, a second group received 0.5×10⁶ CART19 cells, a third group received 1×10⁶ CART19 cells, and a fourth group received 2×10⁶ CART19 cells. Tumor size was monitored by measuring the mean bioluminescence of the engrafted tumors over more than 80 days. Only mice receiving 2×10⁶ CART19 cells demonstrated rejection of the tumor and inhibition of tumor growth (FIG. 10A). Mice from the two groups receiving 0.5×10⁶ CART19 cells or 1×10⁶ CART19 cells were shown to s a suboptimal anti-tumor response. Mice from these two groups were then randomized, where three mice (mouse #3827 and #3829 which received 0.5×10⁶ CART19 cells, and mouse #3815 which received 1×10⁶ CART19 cells) received exogenous recombinant human IL-7 at a dosage of 200 ng/mouse by intraperitoneal injection three times weekly starting at Day 85, and two mice did not. The tumor burden of mice receiving exogenous IL-7 from Day 85-125, as detected by mean bioluminescence, is shown in FIG. 10B. All mice receiving IL-7 showed a dramatic response of 1-3 log reduction in tumor burden. Mice that originally received a higher dose of CART19 cells (mouse #3815 which received 1×10⁶ CART19 cells) showed a more profound response. When comparing the tumor burden of mice that received IL-7 treatment to control, before and after IL-7 treatment, tumor reduction in tumor burden was only seen in the mice that had received IL-7 treatment (FIG. 10C).

[1440] T cell dynamics following IL-7 treatment in the lymphoma animal model was also examined. Human CART19 cells were not detectable in the blood prior to IL-7 treatment. Upon treatment of IL-7, there was rapid, but variable increase in the numbers of T cells in the treated mice (FIG. 11A). The extent of T cell expansion observed in mice receiving the IL-7 also correlated with tumor response. The mouse with the highest number of T cells detected in the blood at peak expansion during IL-7 treatment (mouse #3815) had the most robust reduction in tumor burden (see FIG. 10B). Moreover, the time of peak expansion correlated with the T cell dose injected as baseline. The number/level CD3-expressing cells in the blood were also measured before and after IL-7 treatment. In control mice, very few CD3-expressing cells were detected, while IL-7-treated mice showed a significant increase in CD3+ cells after IL-7 treatment (FIG. 11B).

[1441] Together, the results in this example demonstrate that exogenous IL-7 treatment increases T cell proliferation and anti-tumor activity in vivo, indicating that use of IL-7 in patients with suboptimal results after CAR therapy can improve anti-tumor response in these patients.

### Example 9: Evaluation of CD22 CAR

[1442] Automated Jurkat-NFAT-Luciferase (JNL) Cell Assay

[1443] An automated assay was performed to determine reactivity of specific CD22 CART clones. 3e⁴ lentivirally-transduced Jurkat cell line cells stably expressing luciferase from an NFAT promoter (JNL cells) were plated in a 96 well plate with CD22-expressing target cell lines (Daudi, Raji) and a non-CD22 expressing cell line (K562) as a negative control. The next day, luciferin substrate was added to each well of the 96 well plate and relative luminescence of the luciferase reporter was determined. In this assay, CD22 CAR constructs were compared to a CD19 CAR construct and a CD22 (m971-derived) CAR construct (m971-HL) that served as positive controls. A m971-LH CAR construct, which contains the VH and VL chains of m971-HL but in reverse orientation (L-H instead of H-L), contained a CAR but was unable to bind target due to lack of specificity and served as a negative control. Untransduced T-cells containing no CAR (Neg cnt) also served as a negative control. Luciferase activity from Jurkat T-cell activation was graphed. The results presented herein demonstrate that several of the CD-22 transduced JNL clones showed specific reactivity towards the CD22-expressing cell lines that increased in a dose-dependent manner (FIGS. 18A-18C).

[1444] Expression of CD22 CAR in Primary Human T-Cells

[1445] Primary human T-cells were activated with anti-CD3/antiCD28 stimulatory beads on day 0, followed by lentiviral transduction of specified CAR constructs on day 1. Cells were expanded in vitro until day, 10 at which point they were analyzed by flow cytometry for surface expression of CAR. Two different approaches were utilized to determine surface expression of CAR: Protein-L-biotin followed by streptavidin-PE, and recombinant human CD22-Fc followed by anti-Fc-alexafluor 488. The results are shown in FIGS. 19A, 19B, 19C, and 19D. The results presented herein demonstrate that CD22 CAR clone 2 (hCD22-2), clone (hCD22-5), clone 7 (hCD22-7), clone 8 (hCD22-8), clone 10 (hCD22-10), clone 12 (hCD22-12), clone 30 (hCD22-30), and clone 31 (hCD22-31) showed positive surface expression. CD22 CAR m971 served as a positive control for binding both Protein-L and hrCD22-Fc, and Isotype CAR with no specificity (anti-gH) served as a positive control for Protein-L. T cells expressing no CAR were used as a negative control.

[1446] Primary T-Cell Tumor Target Killing Assay

[1447] Primary T-cells activated and transduced as described above were mixed with target cell lines stably expressing luciferase at the ratios indicated (FIG. 20A-20F). Target cell lines Raji, SEM, K562-hCD22, Daudi, and Nalm6 all expressed CD22 target, whereas the K562 cell line did not express CD22 and served as a negative control (FIG. 20A-20F). The results presented herein demonstrate that several CD22 CAR clones (e.g., CD22 CAR clones 2, 5, 7, 8, 10, 12, 30, and 31) and positive control CD22 m971-HL CAR exhibited dose-dependent target cell killing, with extent of killing varying depending on target cell type. Untransduced T-cells (UTD) lacked the ability to kill target cell lines.

[1448] Primary T-Cell Cytokine Bead Array

[1449] The ability of CD22-expressing cell lines to induce release of proinflammatory cytokines from CD22-expressing CART cells was investigated. Proinflammatory cytokine concentration was determined using a cytokine bead array kit on samples taken from the primary T-cell killing assay. Interferon-g (IFN-g), Tumor necrosis factor alpha (TNFa), and interleukin 2 (IL-2) were all measured on samples from 2.5:1 E:T and 10:1 E:T ratios. The results are shown in FIG. 21A-21F. The results presented herein demonstrate that multiple CD22 CAR clones induced significantly more IFN-g, TNFa and IL-2 than the m971-LH CAR (negative control) or untransduced T-cells (UTD), with cytokine induction levels varying by target cell type.

### Example 10: Dose Escalation Study of CD22 CART Treatment

[1450] A phase 1 clinical trial is performed to determine the optimal dose of CD22 CART with or without CD19 CART in ALL subjects who have and have not previously received CART therapy. The purpose of this study is to determine the feasibility of producing anti-CD22 CAR engineered T cells meeting the established release criteria and to assess the safety of administering escalating doses of autologous anti-CD22 CAR engineered T cells in children and young adults with B cell malignancies following a cyclophosphamide/fludarabine lymphodepletion regimen.

[1451] Subjects are between 1 and 30 years of age and weighing at least 15 kg with CD22+ ALL. Disease activity is measurable by bone marrow analysis or FDG-PET. Subjects with minimal residual disease activity are allowed. Subjects with a central nervous system (CNS) status of 1 or 2 are allowed. Subjects must have adequate organ function and adequate CD3 count.

[1452] A phase 1 dose escalation study with an expansion cohort is performed. Subjects are stratified according to whether they have or have not previously received CART therapy. Subjects are given one of four dose levels of four doses of autologous anti-CD22 CAR engineered T cells: 3×10⁵ cells/kg body weight, 1×10⁶ cells/kg body weight, 3×10⁶ cells/kg body weight and 1×10⁷ cells/kg body weight. A subset of the subjects receiving the 3×10⁶ cells/kg body weight dose are also given anti-CD19 CAR engineered T cells. The first 2 patients at each dose level are 16 years of age or older.

[1453] After eligibility is determined, apheresis is performed to isolate T cells. Subjects then undergo preparative chemotherapy. Subjects are treated with 25 mg/m² fludarabine daily for three days and given a single dose of 900 mg/m² of cyclophosphamide. Anti-CD22 CAR engineered T cells are then administered and 28 days later response and toxicity are evaluated.

### Example 11: Utilization of CD20-Targeting Chimeric Antigen Receptors (CARS) for the Treatment of B-Cell Malignancies

[1454] A Jurkat-NFAT-Luciferase (JNL) cell assay was performed to determine reactivity of specific CD20 CART clones. Jurkat cells stably expressing luciferase from an NFAT promoter (JNL cells) were lentivirally transduced with CAR constructs shown in FIG. 15A-15C. CAR-expressing JNL cells (3e4) were mixed with CD20 expressing target cell lines Daudi (FIG. 15A) and Raji (FIG. 15B), and a non CD20 expressing negative control K562 (FIG. 15C) at effector cell:target cell (E:T) ratios of 0.5:1, 1:1, 2:1, and 4:1. Lentivirally transduced JNL cells were plated in a 96 well plate with CD20-expressing target cell lines (Daudi, Raji) and a non-CD20 expressing cell line (K562) as a negative control. The next day, luciferin substrate was added to each well of the 96 well plate, and relative luminescence of the luciferase reporter (from Jurkat T-cell activation) was determined. In this assay, CD20 CAR constructs were compared to a CD19 CAR construct and a CD22 (m971-derived) CAR construct described in Haso et al., Blood, 14 Feb. 2013, Vol. 121, No. 7 that served as positive controls. Isotype CAR, which contained a CAR but was unable to bind target due to lack of specificity, and untransduced T-cells containing no CAR (Neg cnt) served as negative controls. The results are shown in FIG. 15A-15C. Several of the CD20 transduced JNL clones showed specific reactivity towards the CD20-expressing cell lines that increased in a dose-dependent manner.

### Example 12: Identification of Factors that Predict Subject Relapse to CD19CART Therapy in B-Cell Acute Lymphocytic Leukemia (B-ALL)

[1455] The present Example describes, among other things, the identification of novel transcriptional gene signatures that predict patient relapse to CD19CART therapy (e.g., CTL019 therapy) in B cell Acute Lymphocytic Leukemia (B-ALL), for use in accordance with the present invention.

[1456] Among other things, the present Example describes novel gene signatures based on mRNA expression levels of selected genes in the patient prior to CD19CART treatment (e.g., CTL019) (apheresis or bone marrow) or in manufactured CD19CART product samples (e.g., CTL019) prior to re-infusion. In an embodiment, the present example describes novel gene signatures that discriminate relapsers to CTL019 therapy in B-ALL from non-relapsers to CTL019 therapy in B-ALL.

[1457] The present Example describes methods of unbiased feature selection to discover novel gene signatures that predict subject relapse to CD19CART therapy (e.g., CTL019) in B-ALL, for use in accordance with the present invention.

[1458] The present Example also describes methods of Gene Set Analysis to discover novel gene signatures, for use in accordance with the present invention.

[1459] Novel gene signatures based on mRNA expression levels in manufactured CD19CART product samples prior to re-infusion were identified that predict subject relapse to CD19CART therapy in B cell Acute Lymphocytic Leukemia (B-ALL). The identified signatures were discovered in a whole genome RNAseq study of manufactured product samples which included 7 B-ALL subject samples. B-ALL subject samples (7 total) were stratified as follows: biological samples were taken from 4 subjects who did not relapse (“non-relapsers”) following CTL019 therapy, and 3 subjects who did relapse (“relapsers”) following CTL019 therapy. Several gene signatures discriminating responders from non-responders, and relapsers from non-relapsers, in manufactured product samples were discovered and are described further in detail below.

[1460] Novel gene signatures were then discovered using various data analytical approaches: 1) unbiased feature selection; 2) gene set analysis; and 3) differential expression analysis of selected genes of interest.

[1461] Novel gene signatures derived from unbiased feature selection were discovered by determining which genes were differentially expressed between the 2-group comparison of relapsers and non-relapsers which compared the 3 relapsers to the 4 non-relapsers. Genes were defined as differentially expressed if their differential expression was statistically significant in the 2-group comparison with a FDR p-value cutoff of 0.25. The gene list for the relapser versus non-relapser comparison (N=17) is tabulated in Table 29. 2-group statistical models were applied to determine whether the meta-gene was statistically different between the groups and an exemplary schematic illustrating the approach is illustrated in FIGS. 32A and 32B. FIGS. 32A and 32B depict an exemplary heat map of genes upregulated in activated T_{EFF} versus resting T_{EFF} cells for complete responders (CR), partial responders (PR), and non-responders (NR) with CLL.

[1462] Without wishing to be bound by a particular theory, these data indicate that the differentiation state of T cells in CD19CART product (e.g., CTL019) correlate with subject response (i.e., CR, PR, or NR) and predict subject relapse to CD19CART therapy (e.g., CTL019 therapy) in B-ALL. Complete responders gene signatures are more like resting T_{REG} and T_{EFF} cells. Among other things, gene signatures for relapsers (e.g., a complete responder that relapses to CTL019 therapy) contain genes upregulated in T_{REG} versus T_{EFF} cells at resting. Without wishing to be bound by a particular theory, these data indicate that relapsers to CART therapy (e.g., CTL019) in B-ALL have higher levels of T_{REG} compared to non-relapsers to CART therapy (e.g., CTL019). FIG. 17 depicts exemplary results illustrating that T_{REG} are differentially enriched in relapsers (R) versus non-relapsers, e.g., relapsers express high levels of T_{REG} genes compared to complete responders (CR) (e.g., non-relapsers).

TABLE 29
Exemplary Genes that Predict Patient Relapse to CTL019 Therapy

| Gene | miRBase | Unigene | Accession No. | FDR |
|---|---|---|---|---|
| MIR199A1 | MI0000242 | | NR_029586.1 | 2.11E−05 |
| PPIAL4D | | Hs.730589 | NM_001164261.1 | 3.94E−05 |
| MIR1203 | MI0006335 | | NR_031607.1 | 4.63E−03 |
| uc021ovp | | | | 6.73E−03 |
| ITM2C | | Hs.111577 | NM_001012514.2 | 1.17E−01 |
| | | | NM_001012516.2 | |
| | | | NM_001287240.1 | |
| | | | NM_001287241.1 | |
| | | | NM_030926.5 | |
| HLA-DQB1 | | Hs.409934 | NM_001243961.1 | 1.17E−01 |
| | | Hs.534322 | NM_001243962.1 | |
| | | | NM_002123.4 | |
| TTTY10 | | Hs.461175 | NR_001542.1 | 1.25E−01 |
| TXLNG2P | | Hs.522863 | NR_045128.1 | 2.27E−01 |
| | | | NR_045129.1 | |
| MIR4650-1 | MI0017277 | | NR_039793.1 | 2.27E−01 |
| KDM5D | | Hs.80358 | NM_001146705.1 | 2.27E−01 |
| | | | NM_001146706.1 | |
| | | | NM_004653.4 | |
| USP9Y | | Hs.598540 | NM_004654.3 | 2.27E−01 |
| PRKY | | Hs.584730 | NR_028062.1 | 2.27E−01 |
| RPS4Y2 | | Hs.367761 | NM_001039567.2 | 2.27E−01 |
| RPS4Y1 | | Hs.282376 | NM_001008.3 | 2.27E−01 |
| NCRNA00185 | | Hs.138453 | NR_001543.3 | 2.28E−01 |
| | | Hs.729534 | NR_125733.1 | |
| | | Hs.734681 | NR_125734.1 | |
| | | | NR_125735.1 | |
| | | | NR_125736.1 | |
| | | | NR_125737.1 | |
| SULT1E1 | | Hs.479898 | NM_005420.2 | 2.33E−01 |
| EIF1AY | | Hs.461178 | NM_001278612.1 | 2.38E−01 |
| | | | NM_004681.3 | |

[1463] The following genes showed increased levels in relapsers and decreased levels in non relapsers: MIR199A1, MIR1203, uc021ovp, ITM2C, and HLA-DQB1. The following genes showed decreased levels in relapsers and increased levels in non relapsers: PPIAL4D, TTTY10, TXLNG2P, MIR4650-1, KDM5D, USP9Y, PRKY, RPS4Y2, RPS4Y1, NCRNA00185, SULT1E1, and EIF1AY.

[1464] Gene set analysis yielded a number of gene signatures predictive of subject relapse to CTL019 therapy in B-ALL.

[1465] Among other things, the present Example describes novel gene signatures based on Gene Set Analysis, that are predictive of patent relapse to CD19CART therapy (e.g., CTL019) in B-ALL. Gene set analysis was performed on three gene sets i.e., gene sets were sourced from (1) additional experiments were based on unpublished experiments by Szabo et al., (described below); (2) gene sets published by Abbas et al. in Genome Research 2005; and (3) gene sets published by Gattinoni et al. in Nature Medicine 2011. The gene sets defined by Szabo, Abbs, and Gattinoni and considered in this analysis described in Example 1 of U.S. Provisional Patent App. 62/061,553.

[1466] The Szabo core gene set includes the following genes which are upregulated in Teff cells (16 h v 0 h): AIM2, ALAS1, B4GALT5, BATF, C3orf26, C4orf43, CCL3, CCL4, CCT3, CCT7, CD40LG, CHAC2, CSF2, CTNNA1, EBNA1BP2, EDARADD, EEF1E1, EIF2B3, EIF2S1, FABP5, FAM40B, FKBP4, FOSL1, GFOD1, GLRX2, HSPD1, HSPE1, IFNG, IL15RA, IL21, IL2RA, IL3, KCNK5, KIAA0020, LARP4, LRP8, LTA, MANF, MIR1182, MIR155, MIR155HG, MTCH2, MYOF, NDUFAF1, NLN, NME1, NME1-NME2, OTUD7B, PAM, PDIA6, PEA15, PFKM, PGAM1, PGAM4, PPIL1, PRDX4, PRSS23, PSMD1, PSMD11, PSMD14, PTRH2, PUS7, RBBP8, RPF2, RPP25, SFXN1, SLC27A2, SLC39A14, SLC43A3, SORD, SPR, SRXN1, STIP1, STT3A, TBX21, TMCC2, TMEM165, TNFRSF9, TXN, TXNDC5, UCK2, VDR, WDR12, YWHAG, and ZDHHC16. The Szabo core gene set also includes the following genes which are upregulated in Treg cells (16 h v 0 h): AIM2, ALAS1, BATF, C5orf32, CCL17, CD40LG, CHAC2, CSF1, CTSL1, EBNA1BP2, EDARADD, EMP1, EPAS1, FABP5, FAM40B, FKBP4, FOSL1, GCLM, GK, GPR56, HMOX1, HSPD1, HSPE1, IKBIP, IL10, IL13, IL15RA, IL1RN, IL2RA, IL3, IL4, IL5, IL9, KCNK5, LTA, MANF, MIR1182, MIR155, MIR155HG, MYOF, NDUFAF1, NLN, NME1, NME1-NME2, PANX2, PDIA6, PGAM4, PPIL1, PPPDE2, PRDX4, PRKAR1B, PSMD1, PSMD11, PUS7, RBBP8, SLC27A2, SLC39A14, SLC43A3, SRXN1, STIP1, STT3A, TBX21, TNFRSF11A, TNFRSF1B, TNFRSF8, TNFRSF9, TXN, UCK2, VDR, VTRNA1-3, WDR12, YWHAG, ZDHHC16, and ZNF282.

[1467] Each gene set (e.g., Szabo gene sets, Abbas gene sets, and Gattinoni gene sets) was evaluated to determine its association with subject response (i.e., relapser or non-relapser) in the following manner: a meta-gene was calculated for each subject, where the meta-gene score for subject j was defined as

$${m}_{j} = {\sum }_{i = G}^{1} {x}_{ij} - μ ( {x}_{. j} ) / σ ( {x}_{. j} )$$

[1468] where xᵢⱼ is the expression value of gene i in subject j for a given gene set n=1, . . . , G; μ(x_{.j}) is the mean of genes 1, . . . , G in subject j; and σ(x_{.j}) is the standard deviation of genes 1, . . . , G in subject j.

[1469] A 2-group statistical model was applied to each gene set to determine whether the meta-gene was statistically different between the manufactured CTL019 product of relapsers and non-relapsers. A schematic illustrating this approach is given in FIG. 16. Of the Szabo, Abbas, and Gattinoni gene sets, there was one gene set that was significantly differentially enriched between relapsers and non-relapsers. This gene set was from the Szabo collection and contains genes upregulated in T_{REG} versus T_{EFF} cells at resting, and correlated with patient relapse to CTL019 therapy. Specifically, this gene set was found to be enriched in relapsers, indicating that relapsers have higher levels of T_{REGS} compared to non-relapsers. For example, the meta-gene score for the gene set comprised of genes upregulated in T_{REG} in comparison to T_{EFF} cells is found to be correlated with patient relapse in product samples (see FIG. 17). FIG. 17 depicts exemplary results (p=0.000215) illustrating that T_{REG} genes have high expression levels in relapsers (R) compared to non-relapser, complete responders (CR). The x-axis is samples by response group where CR=complete responder and R=relapser. The y-axis is normalized meta-gene expression scores.

[1470] Without wishing to be bound by a particular theory, these data indicate that decreasing the T_{REG} signature in the patient prior to apheresis or during manufacturing of the CART product significantly reduces the risk of patient relapse.

### Example 13: Insertion Mutations are a Mechanism of Resistance to CTL019 Therapy in B Cell Acute Lymphoid Leukemia (B-ALL)

[1471] Several resistance mechanisms have been discovered by comparing the mRNA sequencing data from B-ALL patient samples taken at baseline and after relapse. Certain resistance mechanisms are referred to as “CD19− relapse”, i.e. the patient's tumor cells are characterized as CD19− since they do not bind to the FMC63 epitope used in CTL019 as measured by flow cytometry. Several resistance mechanisms have been discovered and are described in detail in this Example.

[1472] mRNA sequencing (RNAseq) was performed to compare the transcriptional profiles of B-ALL patients before CTL019 treatment and after relapse. Three patients were considered: one patient (Patient #29), who was CD19− at the time of relapse, and two patients (Patients #104 and #10⁵), who were CD19+ at relapse. See Table 30 below for a list of patients, their classification, and percentage of leukemia at both time points.

TABLE 30

| | | % Leukemia in BM, | % Leukemia in BM, |
|---|---|---|---|
| Sample | Type of relapse | baseline | relapse |
| Patient #29 | CD19− | N/A | N/A |
| Patient # 104 | CD19+ | 33% | 98.5% |
| Patient # 105 | CD19+ | 46% pre-CART | 65% |

[1473] Analysis of the RNAseq data for the CD19 gene revealed several noteworthy observations.

[1474] Three insertions were found in exon 2 of CD19. The insertions were only found in the relapse sample for patient #29. No reads supporting any of the three insertions, or any other insertion in exon 2 of CD19, were observed in the other two patients and at baseline for patient #29. The genomic locations and actual insertions are tabulated in Table 31 below.

TABLE 31

| Insertion | Location | Wild Type | Inserted Sequence |
|---|---|---|---|
| 1 | 28943706 | C | C --> CA |
| 2 | 28943707 | A | A --> AT |
| 3 | 28943811 | T | T --> TTTGG |

[1475] The lengths of the three insertions are 1, 1, and 4 bases long respectively and are likely all frameshift insertions. All three of the insertions result in premature stop codons within exon 2 (for insertions 1 and 2 a new stop codon occurs at ch16:28943752 and for insertion 3 at ch16:28943887). Table 32 below lists the number of reads supporting the insertion and the wild type as well as associated percentages. The most prevalent insertion is “insertion 3” which is a 4 base insertion and occurs −30%. Moreover, out of the 15 paired reads which span more than one insertion, none of the paired reads contained more than one insertion, suggesting the insertions are mutually exclusive.

TABLE 32

| Sample | Ins1 (Ins, wt) | Ins2 (Ins, wt) | Ins3 (Ins, wt) |
|---|---|---|---|
| 29B | 0, 62 | 0, 62 | 0, 50 |
| 29R | 21, 308 | 4, 327 | 67, 151 |
| 104B | 0, 69 | 0, 69 | 0, 79 |
| 104R | 0, 392 | 0, 398 | 0, 413 |
| 105B | 0, 42 | 0, 42 | 0, 63 |
| 105R | 0, 184 | 0, 185 | 0, 212 |

[1476] In the Table, “Sample” lists the patient number followed by “B” for baseline sample or “R” for a sample taken upon relapse. The column labeled Ins1 indicates the number of reads showing Ins1 (left number) versus the wild-type sequence at that position (right number); the column labeled Ins2 indicates the number of reads showing Ins2 (left number) versus the wild-type sequence at that position (right number); and labeled Ins3 indicates the number of reads showing Ins3 (left number) versus the wild-type sequence at that position (right number). The Table indicates that only patient 29 showed these three insertions, and the insertions were only observed upon relapse. These results suggest that insertions in exon 2 of CD19 lead to resistance in some patients.

[1477] This work identified resistance mechanisms to CTL019 therapy in B-ALL, namely insertions in exon 2 of CD19 by which the tumor cells become CD19− and resistant to CTL019 therapy. This observation provides support for a CTL019 combination strategy with CARs against targets other than CD19, e.g., CD20, CD22, and ROR1.

### Example 14: Expression of B-Cell Antigens in Relapsed ALL Cancer Patients

[1478] Expression of various B-cell antigens was determined in relapsed acute lymphoblastic leukemia (ALL) cancer patients who had previously been treated with a cancer therapy other than a CAR therapy, i.e., had not been treated with any CAR therapy.

[1479] Methods

[1480] Samples were obtained as de-identified primary human ALL bone marrow (BM) and peripheral blood (PB) specimens. Anti-human antibodies were purchased from Abcam, Biolegend, Invitrogen, eBioscience, or Becton Dickinson. Mononuclear cells were isolated by Ficoll separation, washed once in PBS supplemented with 2% fetal calf serum, and stained for 15 minutes at room temperature. For cell number quantitation, Countbright (Invitrogen) beads were used according to the manufacturer's instructions. In all analyses, the population of interest was gated based on forward vs. side scatter characteristics followed by singlet gating, and live cells were gated using Live Dead Aqua (Invitrogen). Time gating was included for quality control. For animal studies the murine anti-CD45 antibody (Biolegend) was added to gate out murine leukocytes. Surface expression of CD22 was detected by staining with anti-CD22 monoclonal antibody from clone HIB22 (Biolegend). Surface expression of CD123 was detected by staining with anti-CD123 monoclonal antibody from clone 6H6 (ebioscience). Surface expression of FLT3 was detected by staining with anti-FLT3monoclonal antibody from clone IM2234U (Beckman Coulter). Surface expression of ROR1 was detected by staining with anti-ROR1 monoclonal antibody from clone 2H6 (Abcam). Surface expression of CD79b was detected by staining with anti-CD79b monoclonal antibody from clone CB3-1 (Biolegend). Surface expression of CD79a was detected by staining with anti-CD79a monoclonal antibody from clone HM47 (R&D Systems). Surface expression of CD10 was detected by staining with anti-CD10 monoclonal antibody from clone eBioCV-CALLA (ebioscience). Surface expression of CD34 was detected by staining with anti-CD34 monoclonal antibody from clone 561 (Biolegend). Surface expression of CD20 was detected by staining with anti-CD20 monoclonal antibody from clone L27 (BD Biosciences). Quantitation of cellular antigen expression in Antibody Binding Capacity (ABC) units was performed using Quantum™ Simply Cellular® (Bangs Lab., Inc) according to standard procedure (static.abdserotec.com/uploads/ifu/fcsc815b.pdf). Flow cytometry was performed on a four-laser Fortessa-LSR cytometer (Becton-Dickinson) and analyzed with FlowJo X 10.0.7r2 (Tree Star).

### Results

[1481] In the relapsed ALL patients, several B-cell antigens were expressed, including CD19, CD22, CD123, FLT-3, CD10, and CD34. See FIG. 22.

[1482] In order to identify potential additional B-cell acute lymphoblastic leukemia (B-ALL) targets, samples from 16 r/r patients were screened by multiparametric flow cytometry for the following markers: CD19 (16 pts), CD22 (16 pts), CD123 (16 pts), FLT-3 (9 pts), ROR-1 (3 pts), CD79b (15 pts), CD179b (8 pts), CD79a (16 pts), CD10 (16 pts), CD34 (16 pts), and CD20 (16 pts). CD22 and CD123 were highly (>60%) and homogeneously expressed in the blasts of r/r ALL patients (bar indicates median % expression, respectively 99.50%, 98.80%, 95.70%, 72.00%, 47.00%, 15.00%, 13.45%, 4.200%, 98.00%, 87.65%, and 7.00%). (FIG. 22).

### Example 15: Expression of B-Cell Antigens in Relapsed CD19-Negative Cancer Patients

[1483] Expression of various B-cell antigens was determined in patients who had previously been treated with a CD19 CAR and who have relapsed with CD19-negative tumors. Flow cytometry was used according to the methods in Example 14 to determine expression of the antigens, with a gating strategy depicted in FIG. 23.

[1484] Expression of CD22 and CD123 was analyzed in BM and PB samples from 6 patients relapsing with CD19-negative leukemia, both before CART19 treatment (baseline) and after (CD19-negative relapse). In all analyses, the population of interest was gated based on forward vs. side scatter characteristics followed by singlet gating, and live cells were gated using Live Dead Aqua (Invitrogen). Time gating was included for quality control. The gating strategy included: time gating→SSC low→singlets→live→CD45dim→CD10+.

### Results

[1485] Almost all patients who became CD19-negative remained both CD22-positive and CD-123-positive. See FIG. 24 and FIG. 25. The results are summarized in FIG. 26, and demonstrate that while CD19 CART treatment results in a loss of CD19 expression (as measured by flow cytometry), CD22 and CD123 expression remains high.

### Example 16: Expanded Access Treatment with Autologous CD22 Redirected CART Cells in Refractory B-Cell Malignancies

[1486] Relapsing/refractory (r/r) B-cell Acute Lymphoblastic Leukemia (ALL) is associated with a poor prognosis in both pediatric and adult patients. Novel therapies targeting CD19 on leukemic blasts, such as anti-CD19 Chimeric Antigen Receptor T cells (CART19, CTL019) or bi-specific anti-CD19/CD3 antibodies (blinatumomab) induce significant responses in this population. However, CD19-negative relapses have been reported in 5-10% of patients following CART19 or blinatumomab therapies.

### Methods

### Cell Line and Primary Samples

[1487] Cells of the ALL cell line, NALM-6, were maintained in culture with RPMI media supplemented with 10% fetal calf serum, penicillin, and streptomycin. For some experiments, NALM-6 cells were transduced with luciferase/GFP+ and then sorted to obtain a >99% positive population. The acute myeloid leukemia cell lines MOLM-14 or K562 and the T-ALL cell line JURKAT were used as CD22-negative controls.

[1488] De-identified primary human ALL bone marrow (BM) and peripheral blood (PB) specimens and BM and PB samples from two patients relapsing after CART-19 therapy were obtained. ALL blasts from patient treated with CART-19 and relapsed with CD19-negative leukemia were collected at baseline (IR82, prior to CART19 therapy) and relapse (IR243). Primary blasts from these 2 time points were expanded in vivo in NSG mice and transduced with luciferase/GFP after several passages (Barrett, D et al. (2011) Blood 118(15):e112-117). For all functional studies, ALL cells were thawed at least 12 hours before analysis and rested at 37° C.

### Generation of CAR Constructs and CAR T Cells

[1489] A chimeric antigen receptor (CAR) against CD22 was generated using the anti-CD22 single-chain variable fragment light (L) and heavy (H) chain sequences described in U.S. Patent Application No. 2011/0020344 A1, which describes generation of an anti-CD22 fully human monoclonal antibody m971 (Xiao, X et al. (2009) MAbs. 1(3):297-303). The sequences were codon-optimized and two different CAR constructs were generated using two different variable chain orientations (H to L and L to H). These two anti-CD22 scFvs were then cloned into a murine CAR19 backbone (CD8 hinge, 41BB costimulatory domain and CD3 zeta signaling domain) and subsequently in the pTRPE lentiviral vector. Murine CAR19 was generated as previously described (Milone, M et al. (2009) Molecular therapy: the journal of the American Society of Gene Therapy 17(8):1453-1464).

[1490] Production of CAR-positive T-cells was performed as previously described (Gill, S et al. (2014) Blood 123(15):2343-2354). Normal donor CD4-positive and CD8-positive T cells were plated at the concentration of 1e6/ml, with a CD4:CD8 ratio of 1:1 and expanded in X-vivo 15 media (Lonza, 04-418Q), human serum AB 5% (Gemini, 100-512), penicillin/streptomycin (Gibco, 15070063) and Glutamax (Gibco, 35050061) using anti-CD3/CD28 Dynabeads (Life Technologies, 11161D) added on the day 1 of culture and removed on day 6. T-cells were transduced with lentivirus carrying either CAR22, CAR19 or mock transfected on day 2. T-cells were expanded in culture for 10-15 days and harvested when the median cell volume was below 300 fl. T-cells were then cryopreserved in FBS 10% DMSO for future experiments. Prior to all experiments, T-cells were thawed and rested overnight at 37° C.

### Multiparametric Flow Cytometry Analysis

[1491] Anti-human antibodies were purchased from Biolegend, eBioscience, or Becton Dickinson. Cells were isolated from in vitro culture or from animals, washed once in PBS supplemented with 2% fetal calf serum, and stained for 15 minutes at room temperature. For cell number quantitation, Countbright (Invitrogen) beads were used according to the manufacturer's instructions. In all analyses, the population of interest was gated based on forward vs. side scatter characteristics followed by singlet gating, and live cells were gated using Live Dead Aqua (Invitrogen). Time gating was included for quality control. For animal studies the murine anti-CD45 antibody (Biolegend) was added to gate out murine leukocytes. Surface expression of anti-CD22 CAR was detected by staining with CD22-His protein (11958-H08H-50) and anti-His-APC monoclonal antibody (IC050A). CAR19 was detected as previously described (Kalos, M et al. (2011) Science translational medicine 3(95):95ra73). Quantitation of CD19 and CD22 cellular antigen expression in Antibody Binding Capacity (ABC) units was performed on NALM-6 and controls using Quantum™ Simply Cellular® (Bangs Lab., Inc) according to standard procedure (static.abdserotec.com/uploads/ifu/fcsc815b.pdf). Flow cytometry was performed on a four-laser Fortessa-LSR cytometer (Becton-Dickinson) and analyzed with FlowJo X 10.0.7r2 (Tree Star).

### Degranulation Assay

[1492] Degranulation assays were performed as previously described. T-cells were incubated with target cells at a 1:5 ratio in T cell media. Anti-CD107a-PECY7 (Biolengend), anti-CD28 (BD Biosciences), anti-CD49d (BD Biosciences) antibodies and monensin (BD Biosciences) were added to co-culture 30 minutes after starting time. After 4 hours, cells were harvested and stained for CAR expression, CD3, CD8 and Live Dead aqua staining (Invitrogen). Cells were fixed and permeabilized (Invitrogen Fix/Perm buffers) and intracellular staining was then performed to detect multiple cytokines (IFN, TNFa, IL-2, GM-CSF, MIP1b).

### Proliferation Assay

[1493] T cells were washed and resuspended at 1×107/ml in 100 μl of PBS and stained with 100 μl of CFSE 2.5 μM (Invitrogen) for 5 minutes at 37° C. The reaction was then quenched with cold media, and cells were washed three times. Targets were irradiated at a dose of 100 Gy. T-cells were incubated at a 1:1 ratio with irradiated target cells for 120 hours, adding media at 24 hours. Cells were then harvested, stained for CD3, CAR and Live Dead aqua (Invitrogen), and Countbright beads (Invitrogen) were added prior to flow cytometric analysis for absolute quantification.

### Cytotoxicity Assays

[1494] Luciferase/GFP+ NALM-6 cells or primary ALL samples were used for cytotoxicity assay as previously described. 4 Targets were incubated at the indicated ratios with effector T-cells for 4 or 16 hours. Killing was calculated either by bioluminescence imaging on a Xenogen IVIS-200 Spectrum camera or by flow cytometry. For the latter, cells were harvested and Countbright beads and 7-AAD (Invitrogen) were added prior to analysis. Residual live target cells were CFSE-positive 7-AAD-negative.

### Cytokine Measurements

[1495] Effector and target cells were co-incubated at a 1:1 ratio in T-cell media for 24 hours. Supernatant was harvested and analyzed by 30-plex Luminex array (Luminex Corp, FLEXMAP 3D) according to the manufacturer's protocol (Invitrogen) (Kalos, M et al. (2011)).

### In Vivo Experiments

[1496] NOD-SCID-γ chain−/− (NSG) mice were obtained. All experiments were performed on protocols approved by the Institutional Animal Care and Use Committee (IACUC) of the University of Pennsylvania. Schemas of the utilized xenograft models are discussed in details in the results section. Cells (NALM-6 or T cells) were injected in 200 ul of PBS at the indicated concentration into the tail veins of mice. Bioluminescent imaging was performed using a Xenogen IVIS-200 Spectrum camera and analyzed with LivingImage software v. 4.3.1 (Caliper LifeSciences). Animals were euthanized at the end of the experiment or when needed according to IACUC policies.

[1497] Immunohistochemistry

[1498] Tissue microarrays (TMA) of 28 human normal tissues (adipose, adrenal, appendix, cerebellum, cervix, colon, endometrium, esophagus, fat, heart, kidney, liver, lymph node, lung, muscle, ovary, pancreas, parathyroid, placenta, prostate, salivary, spinal, spleen, stomach, testis, thymus, thyroid, tonsil) were performed in order to evaluate off-tumor expression of CD22 (triplicates). Immuno-histochemical (IHC) staining of formalin fixed paraffin embedded tissues was performed on a Leica Bond-III instrument using the Bond Polymer Refine Detection System. Antibodies against CD22 (Clone FPC1; Leica PA0249) were used undiluted. Heat-induced epitope retrieval was done for 20 minutes with ER2 solution (Leica Microsystems AR9640). Images were digitally acquired using the Aperio ScanScope™.

### Gene Expression Profiling.

[1499] Publicly accessible RNA-expression database (GeneAtlas U133A, gc) was analyzed using BioGPS.org website for CD22 expression. Median CD22 RNA expression was reported for 75 different human normal cell types and 7 tumor cell lines (see FIGS. 39A, 39B, 39C and 39D).

### 51-Chromium-Release Assay

[1500] In order to evaluate to possible off-tumor CART22 toxicity, Chromium-release assay was performed, using as a target normal human tissues (CD34+, human neurons, human neuronal progenitors, keratinocytes) and K562 or NALM-6 as controls. Target cells were incubated with 51Cr 50 μCi/0.5e6 cells for 1-2 hrs at 37° C. Cells were washed and plated in triplicate with effectors cells at different E:T ratios. After 4 hour-incubation, an aliquot from each well was put in a reader plate and dried overnight. The next day chromium release was quantified using 1450 Microbeta Plus Liquid Scintillation Counter.

### Results

TABLE 33
Summary of the donors and the respective experiments
performed for CART22 evaluation.

| | Expan- | Degran. + i.c. | Prolif. + | Kill- | In | Tox |
|---|---|---|---|---|---|---|
| Donors | sion | cytokines | Luminex | ing | vivo | Screen |
| 1 | ✓ | ✓ X2 | ✓ X2 | ✓ X2 | ✓ | |
| 2 | ✓ | ✓ | | | | |
| 3 | ✓ | | | | ✓ | ✓ |
| 4 | ✓ | | | | | |
| 5 | ✓ | | | | ✓ | |

[1502] In order to identify potential B-ALL targets, samples from 16 r/r patients and 4 patients relapsing with CD19-negative disease after treatment with CART19 therapy were screened by multiparametric flow cytometry for the B cell marker, CD22. CD22 was highly (>60%) and homogeneously expressed in the blasts of 11/15 r/r ALL patients (FIG. 27A). CD22 was also positive in 4/4 patients relapsing with CD19-negative leukemia, both before CART19 treatment (baseline) and after (CD19-neg relapse) (2 pts shown) (FIG. 27B). (Gating strategy: SSC low→singlets→live→CD45dim).

[1503] The schema of the CAR22 constructs that were generated using different chain orientations (H to L and L to H) is shown in FIG. 28A. The anti-CD22 scFv (m971) was codon optimized and cloned in the murine CAR19 vector containing CD8 hinge, 41-BB costimulatory and CD3 zeta signaling domains. The expression of CD19, CD22 and isotype control on NALM6 ALL cell line is shown as mean fluorescence intensity (MFI) (FIG. 28B) and antibody-binding capacity (ABC) (FIG. 28C). The results presented herein demonstrate that in NALM-6 cells, the expression of CD19 is higher than CD22. However, in most primary ALL samples, the CD19 and CD22 expressions are similar (see FIG. 28A).

[1504] Normal donor T-cell expansions for generating CART22 and CART19 (together with untransduced cells (UTD)) were carried out. Population doubling times and T-cell volume were measured relative to days in culture. At the end of the expansion (day 11 in culture) CART22 and control T-cells reached around 4.5 population doublings (PD), with no significant difference in comparison to CART19 or UTD cells (FIG. 29A). At day 6 in culture the peak volume was around 450 fl, while in the following days the volume decreased down to 300 fl when the cells were harvested and frozen (FIG. 29B). No significant different was observed versus CART19 or UTD. CAR expression on CD4-positive and CD8-positive T cells was observed at day 11 of expansion by flow cytometry (FIG. 29C). Gating for CAR expression is based on UTD. (Gating strategy: FSS vs SSC lymphocytes→singlets→live→CD3+).

[1505] CD107a degranulation assay with intra-cytoplasmic cytokine production was carried out. CART19, CART22 HtoL and LtoH were co-cultured with different targets (alone, PMA/IONOMYCIN, MOLM-14 and NALM-6). CART19 and CART22 HtoL showed high levels of CD107a degranulation, IL-2, IFNg and TNFa production when co-cultured with the ALL cell line (NALM-6) but not when co-cultured with negative controls (FIG. 30). UTD and CART22 LtoH do not show degranulation nor cytokine productions (FIG. 30). (Gating strategy: FSS vs SSC lymphocytes→singlets→live→CD3+).

[1506] In a luciferase-based killing assay, CART22 and CART19 HtoL but not UTD were able to lyse NALM-6 cells when co-cultured for 24 hours (FIG. 31). A direct correlation between cytotoxic activity and E:T ratios was observed, with better anti-leukemia effect at 2:1 E:T ratio (78% and 75% killing for CART19 and CART22).

[1507] In a CF SE-based proliferation assay, co-culture for 5 days of CART22 and CART19 with the ALL cell line NALM-6 led to significant T cell proliferation (94% and 92.9% respectively). Controls are also shown (TCM=media alone, P-I=PMA/Ionomycin, MOLM-14) (FIG. 32A) Histograms showing the dynamics of CFSE dilution in CART19 and CART22 demonstrate that most T-cells underwent multiple proliferative cycles (FIG. 32B). (Gating strategy: FSS vs SSC lymphocytes→singlets→live→CD3+)

[1508] CART22, CART19 and UTD cells were incubated for 24 hours with different irradiated targets (alone, PMA/Ionomycin, MOLM-14 and NALM-6). When co-cultured with the ALL cell line NALM-6, only CART22 and CART19 HtoL were able to release multiple cytokines (here shown IFNg, IL-2, GM-CSF, TNFa and MIP1b) (FIG. 33).

[1509] CART22, CART19 and UTD cells were co-incubated for 4 hours with blasts derived from an ALL patient (CHP-959-101) at baseline and after CART19 treatment when the patient relapsed with a CD19-negative disease. Degranulation was measured. Both CART19 and CART22 were able to degranulate at baseline (when blasts are CD19+ and CD22+) but at relapse only CART22 was degranulating (when the disease is CD19-negative) (FIG. 34A). CD107a degranulation was measured in CD8-positive and CD8-negative CART19 and CART22 effector after incubation with CHP101 sample at relapse. Only CART22 showed degranulation in both CD8 and CD4 T-cells (FIG. 34B). (Gating strategy: FSS vs SSC lymphocytes→singlets→live→CD3+).

[1510] In vivo CART22 efficacy against NALM-6 was assessed as follows: 1 million NALM-6 luciferase+ cells/mouse were injected i.v. in NSG mice. After 6 days tumor engraftment was assessed by bioluminescence. Mice were then randomized to receive untransduced T-cells or different doses of CART22 (from 1.25 to 5 million total cells/mouse, with 75% CAR expression). Mice were then monitored for tumor burden, PB T cell expansion, and survival (FIG. 35A). Tumor burden by bioluminescence (BLI) was measured and dose-related anti leukemia response was observed. Mice receiving 5e6 CART22 cells showed better tumor control (FIG. 35B). CART22 treated mice showed a statistically significant better overall survival (OS) in comparison to UTD treated mice. Also for OS there was a significant correlation between higher dose of CART22 and better OS (FIG. 35C). T-cell in vivo expansion was monitored weekly by retro-orbital bleedings. One week after T cell infusion mice receiving the higher dose of CART22 showed the better CART expansion (median of 12 T cells/μl) (FIG. 35D).

[1511] In vivo comparison between CART22 and CART19 against NALM-6 was assessed as follows: 1 million NALM-6 luciferase+ cells/mouse were injected i.v. in NSG mice. After 6 days tumor engraftment was assessed by bioluminescence. Mice were then randomized to receive untransduced T-cells, CART19 or CART22 (5 million total cells, with 75% CAR expression). Mice were then monitored for tumor burden, PB T-cell expansion, and survival (FIG. 36A). Tumor burden by bioluminescence (BLI) was measured and anti-leukemia response was observed in both CART22 and CART19 treated mice, while UTD mice rapidly progressed (FIG. 36B). CART19 treated mice showed better overall survival (OS) in comparison to CART22, possibly due to the different target expression in NALM-6 (CD19>>CD22) (FIG. 36C).

[1512] CART22 and CART19 were compared in vivo in a model of primary ALL. The blasts of a primary ALL patient (JH331) were passaged in vivo and transduced with luciferase to follow tumor burden. 1 million JH331 luciferase+ cells/mouse were injected i.v. in NSG mice. After 14 days tumor engraftment was assessed by bioluminescence. Mice were then randomized to receive untransduced T-cells, CART19 or CART22 (5 million total cells, with 75% CAR expression). Mice were then monitored for tumor burden, PB T-cell expansion, and survival (FIG. 37A). Tumor burden by bioluminescence (BLI) was measured and anti-leukemia response was observed in both CART22 and CART19 treated mice, while mice treated with UTD cells rapidly progressed (FIG. 37B).

[1513] Tissue microarrays for CD22 expression were performed on 28 human normal tissues by immunohistochemistry staining. Lymphoid organs resulted positive for CD22 expression (tonsil, lymph node, spleen and thymus) (FIG. 38A). All non-lymphoid organs showed no expression of CD22 (FIG. 38B). CD22-positive resident B-cells were observed in multiple tissues (FIG. 38C).

[1514] CD22 RNA expression was observed at high level in B-cells, tonsil and lymph nodes, as shown in expression data from GeneAtlas U133A. B-lymphoblast and leukemia/lymphoma cell lines were also highly positive (FIGS. 39A, 39B, 39C and 39D).

[1515] Both CART22 and CART19 but not UTD cells triggered the lysis of the ALL cell line NALM-6 in a 51-Chromium-release assay for CART22 toxicity (FIG. 40). No cytotoxic effect of CART22 was observed in any normal tissue (CD34+, human neuronal progenitors or neurons and keratinocytes) or control (K562 cell line).

### Example 17: Combination of Anti-CD123 and Anti-CD19 CAR T Cells for the Treatment and Prevention of Antigen-Loss Relapse

[1516] Chemo-refractory or relapsing (r/r) B-cell acute lymphoblastic leukemia (B-ALL) is associated with a poor prognosis but, as demonstrated recently, remains exquisitely sensitive to the immune system. In particular, anti-CD19 chimeric antigen receptor T cells (CART19, CTL019) and bi-specific anti-CD19/CD3 antibodies (blinatumomab) generate unprecedented complete response rates of 45-90% in this patient population. Both approaches re-direct autologous T cells to recognize CD19-expressing cells. Blinatumomab uses a continuous long-term infusion of a bispecific construct that combines an anti-CD19 single chain variable fragment (scFv) with an anti-CD3 scFv; in the case of CART19 T cells are genetically modified to express an anti-CD19 scFv fused to the T cell receptor signaling with built-in co-stimulatory domains. A recent study showed that 90% of patients with r/r B-ALL treated with CTL019 reach complete remission (CR) with an overall survival (OS) of 78% at 6 months. Encouraging results with CART19 were also obtained in patients with other B-cell neoplasms, such as chronic lymphocytic leukemia and non-Hodgkin lymphoma.

[1517] However, a subset of patients treated with CART19 or blinatumomab develops relapse and a significant portion of these relapses are characterized by the loss of CD19. In B-ALL, CD19-negative relapses have been reported in 10-20% of patients following CART19 or blinatumomab therapies and it has not been described in the setting of other treatments; overall about 30% of relapses after blinatumomab and up to 50% after CART19 are CD19-negative. CD19 is a prototypic B-cell marker that is expressed from the very earliest stages of B cell development to the mature B-cell. CD19 plays an important role in B cell biology as CD19-deficient B cells exhibit selective growth disadvantage. Thus the absence of CD19 is a very unusual finding in B-ALL and it is has been reported in only rare patients prior to the era of potent CD19-directed immunotherapies. The possible mechanism of antigen loss is currently under investigation and is most likely caused by selective pressure on leukemia sub-clones by these powerful anti-CD19 agents. Because of the recent approval by the FDA of blinatumomab and the breakthrough status accorded to CTL019, it is likely that increasing numbers of patients with r/r B-ALL will be treated with these agents. Hence, novel effective strategies are needed in order to be able to treat those patients that will relapse with CD19-negative blasts after CART19 or blinatumomab. Ideally a new approach would not only treat patients with active antigen-loss relapse but if employed upfront could potentially prevent their occurrence.

[1518] The interleukin-3 receptor alpha (or CD123) is involved in hematopoiesis and has been shown to be expressed in several hematologic neoplasms, including acute myeloid leukemia (AML), acute lymphoid leukemia (ALL), plasmacytoid dendritic cell neoplasm, hairy cell leukemia, and Hodgkin lymphoma. Unlike lineage-associated surface antigens such as CD33 (myeloid) or CD19 (B-lymphoid), CD123 is hierarchically expressed on hematopoietic progenitor cells and in AML CD123 is expressed on leukemic stem cells that are involved in resistance to chemotherapy and relapse after initial treatment. Due to these characteristics, CD123 has generated great interest for targeted therapy, and multiple agents are being developed such as the IL3-diphtheria toxin fusion protein (SL-401, DT3881L3), naked anti-CD123 monoclonal antibodies (CSL-360, CSL-362), antibody-drug conjugates, bi-specific antibodies or CD3Fv-IL3 fusion constructs, and more recently, anti-CD123 chimeric antigen receptor T cells. Some of these approaches are currently being validated in clinical trials and many more will be tested in the clinic in the next few years. Targeting CD123 with chimeric antigen receptor T cells (CART123) can lead to deep and long-term responses in human primary AML xenografts and can establish an anti-leukemia T cell memory. Here, CD123 is expressed in CD19-negative B-ALL relapses occurring after CD19-directed therapies and that CAR-123 T cells combined with CART19 (CTL019) is an effective therapy for the treatment and for the prevention of antigen-loss relapses in B-ALL xenografts.

### Materials and Methods

[1519] Cell lines and primary samples. Cell lines were originally obtained from ATCC (Manassas, VA) (K-562) or DSMZ (Braunschweig, Germany) (MOLM-14 and NALM-6). All cell lines were tested for the presence of mycoplasma contamination (MycoAlert™ Mycoplasma Detection Kit, LT07-318, Lonza, Basel, Switzerland). For some experiments, cell lines were transduced with firefly luciferase/eGFP and then sorted to obtain a >99% positive population. The luciferase positive K-562 cell line was also transduced with truncated CD19 or truncated CD123 to obtain cell lines expressing neither of them, only CD19 or only CD123. MOLM-14 and K562 were used as controls as indicated in the relevant figures. The cell lines were maintained in culture with RPMI media 1640 (Gibco, 11875-085, LifeTechnologies, Grand Island, NY) supplemented with 10% fetal bovine serum (FBS, Gemini, 100-106, West Sacramento, CA), and 50 UI/ml penicillin/streptomycin (Gibco, LifeTechnologies, 15070-063). De-identified primary human ALL bone marrow (BM) and peripheral blood (PB) specimens were obtained from the clinical practices of University of Pennsylvania/Children's Hospital of Philadelphia under an Institutional Review Board (IRB)-protocol, purchased from the Stem Cells and Xenograft Core of the University of Pennsylvania or from research samples of the current CTL019 clinical trials (Translation and Correlative Study Laboratory, at the University of Pennsylvania). For all functional studies, primary cells were thawed at least 12 hours before experiment and rested at 37° C.
In vivo expansion of primary B-ALL blasts. Methods disclosed in D. M. Barrett, A. E. Seif, C. Carpenito, D. T. Teachey, J. D. Fish, C. H. June, S. A. Grupp, G. S. Reid, Noninvasive bioluminescent imaging of primary patient acute lymphoblastic leukemia: a strategy for preclinical modeling. Blood 118, e112-117 (2011).
Fluorescence in situ hybridization (FISH) and immunohistochemistry. The FISH analysis and immunohistochemistry were performed according to the standard method and as described. (M. A. Belaud-Rotureau, M. Parrens, P. Dubus, J. C. Garroste, A. de Mascarel, J. P. Merlio, A comparative analysis of FISH, RT-PCR, PCR, and immunohistochemistry for the diagnosis of mantle cell lymphomas. Modern pathology: an official journal of the United States and Canadian Academy of Pathology, Inc 15, 517-525 (2002)). The FISH analysis was performed according to the standard method. In brief, harvested ALL cells were suspended in fixative (acetic acid and methanol), deposited on the slides, and left to dry. The dual color gene fusion probe BCR/ABL (Abbott Molecular), was applied in the hybridization buffer solution. The slides were cover-slipped, sealed, and left inside the HYBrite chamber at 37 C for 6 hr. After removal of the sealant and the coverslip, the slides were washed twice, blotted, dried, and counterstained with DAPI. The slides were examined under fluorescent microscope, with a minimum of 200 nuclei evaluated in each specimen.
Generation of CAR constructs and CART cells. The murine anti-CD19 chimeric antigen receptor (CD8 hinge, 4-1BB co-stimulatory domain and CD3 zeta signaling domain) was generated as previously described. (Milone, et al., Molecular therapy: the journal of the American Society of Gene Therapy 17, 1453-1464 (2009) and Imai, et al., Leukemia 18, 676-684 (2004)). This is the same construct currently used in the CTL019 clinical trials at the University of Pennsylvania. For CAR123 scFv anti-CD123 (1172 construct (SEQ ID NO: 707, and as described in PCT/US2014/017328) was used and the same backbone construct of CAR19. Production of CAR-expressing T cells was performed as previously described. (Gill, et al., Blood 123, 2343-2354 (2014)). Normal donor CD4 and CD8 T cells or PB mononuclear cells (PBMC) were obtained from the Human Immunology Core of the University of Pennsylvania. T cells were plated at 1×10⁶/ml with a CD4:CD8 ratio of 1:1 and expanded in X-vivo 15 media (Lonza, 04-418Q), supplemented with human AB serum 5% (Gemini, 100-512), penicillin/streptomycin (Gibco, 15070063) and Glutamax (Gibco, 35050061) using anti-CD3/CD28 Dynabeads (Life Technologies, 11161D) added on the day 1 of culture and removed on day 6. T cells were transduced with lentivirus on day 2. T cells were expanded in culture for 8-15 days and harvested when the median cell volume was below 300 fl. T cells were then cryopreserved in FBS with 10% DMSO for future experiments. Prior to all experiments, T cells were thawed and rested overnight at 37° C.
Multiparametric flow cytometry. Flow cytometry was performed as previously described (Kenderian, et al., Leukemia, (2015)). Anti-human antibodies were purchased from Biolegend, eBioscience, or Becton Dickinson. Cells were isolated from in vitro culture or from animals, washed once in PBS supplemented with 2% fetal calf serum, and stained for 15 minutes at room temperature. For cell number quantitation, Countbright (Invitrogen) beads were used according to the manufacturer's instructions. In all analyses, the population of interest was gated based on forward vs. side scatter characteristics followed by singlet gating, and live cells were gated using Live Dead Fixable Aqua (Invitrogen). Time gating was included for quality control. Surface expression of CAR19 was detected as previously described, using an anti-idiotype antibody. Detection of CAR123 was performed using goat-anti-mouse antibody (Jackson Laboratories) or CD123-Fc/His (Sino Biologicals) and anti-His-APC (R&D) or PE (AbCam). Flow cytometry was performed on a four-laser Fortessa-LSR II cytometer (Becton-Dickinson) and analyzed with FlowJo X 10.0.7r2 (Tree Star).
In vitro T-cell effector function assays. Degranulation, CFSE proliferation, cytotoxicity assays and cytokine measurements were performed as previously described. (Gill, et al., Blood 123, 2343-2354 (2014) and Kalos, et al., Science translational medicine 3, 95ra73 (2011)).
Degranulation assay. Briefly, T cells were incubated with target cells at a 1:5 ratio in T cell media. Anti-CD107a-PECY7 (Biolegend), anti-CD28 (BD Biosciences), anti-CD49d (BD Biosciences) antibodies and monensin (BD Biosciences) were added to the co-culture. After 4 hours, cells were harvested and stained for CAR expression, CD3, CD8 and Live Dead aqua staining (Invitrogen). Cells were fixed and permeabilized (Invitrogen Fix/Perm buffers) and intracellular staining was then performed to detect multiple cytokines (IFN, TNFα, IL-2, GM-CSF, MIP1β).
Proliferation assay. T cells were washed and resuspended at 1×10⁷/ml in 100 ul of PBS and stained with 100 ul of CFSE 2.5 uM (Invitrogen) for 5 minutes at 37° C. The reaction was then quenched with cold media, and cells were washed three times. Targets were irradiated at a dose of 100 Gy. T cells were incubated at a 1:1 ratio with irradiated target cells for 120 hours, adding media at 24 hours. Cells were then harvested, stained for CD3, CAR and Live Dead aqua (Invitrogen), and Countbright beads (Invitrogen) were added prior to flow cytometric analysis for absolute quantification.
Cytotoxicity assays. Luciferase/eGFP+ cell lines were used for cytotoxicity assay as previously described. In brief, targets were incubated at the indicated ratios with effector T cells for 24 hours. Killing was calculated by bioluminescence imaging on a Xenogen IVIS-200 Spectrum camera.
Cytokine measurements. Effector and target cells were co-incubated at a 1:1 ratio in T cell media for 24. Supernatant was harvested and analyzed by 30-plex Luminex array (Luminex Corp, FLEXMAP 3D) according to the manufacturer's protocol (Invitrogen).
Animal experiments. In vivo experiments were performed as previously described. (Kenderian, et al., Leukemia, (2015)). Schemas of the utilized xenograft models are discussed in detailed in the relevant figures, result. NOD-SCID-γ chain−/− (NSG) originally obtained from Jackson Laboratories were purchased from the Stem Cell and Xenograft Core of the University of Pennsylvania. All experiments were performed according a protocol (#803230) approved by the Institutional Animal Care and Use Committee (IACUC) that adheres to the NIH Guide for the Care and Use of Laboratory Animals. Cells (leukemia cell lines or T cells) were injected in 200 ul of PBS at the indicated concentration into the tail veins of mice. Bioluminescent imaging was performed using a Xenogen IVIS-200 Spectrum camera and analyzed with LivingImage software v. 4.3.1 (Caliper LifeSciences). Animals were euthanized at the end of the experiment or when they met pre-specified endpoints according to the IACUC protocols.
Multiphoton microscopy. Mice were anaesthetized and maintained at core temperature of 37° C. Bone marrow was imaged after removing the scalp and immobilizing the skull. Imaging was performed using a Leica SP5 2-photon microscope system (Leica Microsystems) equipped with a picosecond laser (Coherent). Each imaging acquisition lasted 20 min followed by an assessment of mouse sedation. CellTrace Violet, GFP, and CellTrace Orange (or TRITC) were excited using laser light of 850 nm. Images were obtained using a 20× water-dipping lens. The resulting images were analyzed with Volocity software (PerkinElmer).
Statistical Analysis. All statistics were performed as indicated using GraphPad Prism 6 for Windows, version 6.04 (La Jolla, CA). Student's t-test was used to compare two groups; in analysis where multiple groups were compared, one-way analysis of variance (ANOVA) was performed with Holm-Sida correction for multiple comparisons. When multiple groups at multiple time points/ratios were compared, the Student's t-test or ANOVA for each time points/ratios was used. Survival curves were compared using the log-rank test. In the figures asterisks are used to represent p-values (*=<0.05, **=<0.01, ***=<0.001, ****=<0.0001) and “ns” means “not significant” (p>0.05). Further details of the statistics for each experiment are listed in figure legends.

### Results

### CD123 is Expressed in B-ALL, in the Leukemia Stem Cells and in CD19-Negative Relapses

[1520] In order to evaluate the expression of CD123 in B-cell acute lymphoblastic leukemia, 42 samples from adult and pediatric ALL patients were analyzed, including 14 subjects enrolled in our current CTL019 clinical trials. As shown in FIGS. 49A, 49B and 49A, CD123 is highly and homogeneously expressed on the surface of most ALL blasts, representing an ideal candidate for targeted therapy. Moreover, CD123 is also found to be expressed in the putative leukemia stem cells (LSC), identified as CD34+ CD38− (FIG. 49C). Small subsets of CD19-negative blasts can be identified in some B-ALL patients and these cells could contribute to antigen-loss relapses, if they contained cells with a malignant phenotype. In order to evaluate the presence of disease in CD19-negative subsets, CD19− CD123+ cells from a Philadelphia chromosome positive B-ALL bulk population were sorted (CD45dim, gating strategy shown FIG. 56B). It was found that these cells were clonal for the BCR-ABL translocation, albeit at a lower frequency than the CD19+ blasts (FIG. 49D). This finding indicates that targeting CD19 alone could, in some cases, lead to a subclonal relapse derived from CD19−CD123+ cells. Furthermore, this finding suggests that targeting CD123 could lead to deeper responses through the elimination of the LSC and possibly CD19-neg leukemia clones.

[1521] Finally the expression of CD123 was also evaluated in the samples of B-ALL patients relapsing after CTL019 with loss of CD19. Importantly, in contrast to the complete loss of CD19, the majority of patients maintained CD123 expression at relapse (FIGS. 49E, 49F and 56C). These findings indicate that CD123 represents an ideal marker to target CD19-neg ALL blasts occurring after CART19 or blinatumomab.

### Anti-CD123 Chimeric Antigen Receptor T Cells are Active Against Human B-ALL In Vitro and In Vivo

[1522] Anti-CD123 chimeric antigen receptor T cells (CART123) were generated that were lentivirally transduced and expanded with anti-CD3/CD28 magnetic beads. The in vitro and in vivo activity of CART123 against B-acute lymphoblastic leukemia were evaluated as described herein.

[1523] The B-ALL cell line NALM-6 that is CD19++ and CD123+ (FIGS. 50A and 57A) and primary B-ALL samples were used. A head-to-head in vitro comparison between CART123 and CART19 revealed similar rates of CD107a degranulation when T cells were co-cultured with NALM-6 or primary ALL (FIG. 50B). CART123 were also able to kill NALM-6 cells with similar efficacy as CART19 in a dose-dependent manner (FIG. 50C). At more long-term experiments, CART123 proliferated (FIGS. 50D and 50E) and produced multiple cytokines (FIG. 50F) when co-cultured with NALM-6 or primary ALL for 3-5 days. These results indicate that CART123 exhibit equivalent potency to CART-19 against multiple B-ALL targets.

[1524] In order to confirm these data in an in vivo model, a primary ALL model was utilized. In this model, primary blasts obtained from B-ALL patients were passaged in NOD-SCID-γ chain knock-out (NSG) mice and transduced with a reporter construct containing eGFP and click beetle luciferase (GFP/Luc). NSG mice were injected with GFP/Luc+ primary ALL blasts i.v. (JH331, CD19+, CD123+, add phenotype) and after engraftment, mice were randomized to receive CART19, CART123 or control untransduced T cells (UTD). Mice treated with control T cells succumbed quickly to disease, while mice treated with either CART19 or CART123 showed tumor eradication and long term survival (FIGS. 51A and 51B). CAR123 T cells significantly expanded in the peripheral blood (PB) of the mice compared to control T cells and expressed high levels of CAR123 (FIG. 51C). The anti-leukemia activity of CART123 was specific and based on the recognition of CD123 in the surface of the blasts as when we engrafted mice with a CD123− CD19+ leukemia (AV576), only CART19 show anti-leukemia activity, while CART123 had no effect as compared to controls UTD (FIGS. 57B and 57C).

[1525] In order to detect a possible correlation of CART123 dose and anti-tumor activity, an in vivo model of high leukemia burden bearing mice (using the NALM-6 cell line) was developed. In this model standard doses of CART123 (2 million CAR+ cells) are not able to clear the tumor. These mice were injected with different doses of CART123 (1.25, 2 and 5 million CAR+ cells) and observed a dose-related anti-leukemia activity (FIG. 57D).

### CART123 but not CART19 are Highly Active in a Novel Preclinical Model of Antigen-Loss Relapse

[1526] In order to test new strategies to target CD19-negative relapses a novel in vivo model of antigen-loss relapse was developed. B cell blasts obtained from a patient (CHP101) enrolled in one of our CTL019 clinical trials were collected at baseline (before CTL019 therapy), when the disease was CD19++ and CD123+, and at relapse after CTL019 when the patient developed a CD19-negative disease (CD123 still expressed, FIG. 58A). Blasts were then expanded in NSG mice and transduced with click-beetle green luciferase (CBG) for baseline disease (CD19+) or click-beetle red luciferase (CBR) for relapse (CD19−) (see Methods section). Importantly, during in vivo expansion, the blasts retained markers of B cell identity other than CD19 (data not shown). In a first experiment NSG mice were engrafted with either the baseline disease CD19+ (CBG, green) or the CD19-neg (CBR, red) leukemia. Both groups were randomized to receive CART19 or control T cells (UTD) (FIG. 52A). As shown in FIG. 52B, in both groups mice treated with UTD showed rapid progression of both the baseline and relapse disease, independently by the expression of CD19. Conversely, in the group of mice treated with CART19, only mice engrafted with the baseline disease (CD19-positive) responded to CART19 treatment while mice engrafted with the relapsed disease (CD19-negative) showed refractoriness as expected. This was also reproduced in vitro in a CD107a degranulation assay (FIG. 58B). In order to simulate in vivo the presence of different clones expressing CD19 or lacking it, NSG mice were engrafted with a 1:1 mixture of baseline and relapse disease; at day 8 mice were randomized to receive CART19 or control T cells. Tumor burden was monitored with bioluminescence imaging that could discriminate between CD19+ (CBG, green)/CD19− (CBR, red) leukemia relative growth in vivo. As shown in FIG. 52C, in mice receiving UTD both CD19+ (green) and CD19− (red) leukemia present at day 6 was similarly increased at day 11, while in mice treated with CART19 the baseline disease (green) was completely cleared while the relapsed disease (red) showed progression.

[1527] This unique xenograft model of primary CD19-negative B-ALL and CART19 failure was used to evaluate the role of CART123 in the treatment of antigen-loss relapses. Primary CD19-negative blasts (CBR positive) were injected into NSG mice (FIG. 52D) and mice were randomized to receive CART19, CART123 or control T cells. CART19 and control T cells showed complete lack of anti-tumor activity, while CART123 lead to complete eradication of the disease and long term survival in these mice (FIGS. 52E and 52F). Indeed in a pre-clinical model of primary B-ALL refractory to CART19, the novel CART123 are able to eradicate the disease and confer long-term survival.

[1528] In order to understand the differential behavior of CART19 and CART123 in this in vivo model at a single cell level, a series of experiments was performed by injecting a mixture of differentially labelled CART19 (CellTrace Violet, blue) and CART123 (CellTracker Orange or TRITC, red) to mice bearing CD19-positive primary blasts (GFP) or CD19-negative relapsed blasts (GFP) and tracked their behavior using intravital 2-photon microscopy of calvarial marrow approximately 24 hours after injection (experiment schema, FIG. 53A). These studies showed that CART19 and CART123 trafficked to marrow spaces containing leukemia and that CART cell recognition of cognate antigen correlate with motility arrest. Specifically, in mice engrafted with the baseline CD19+CD123+ leukemia, 62.9%+/−3.8 of CART19 and 81.1%+/−1.2 of CART123 were found to be stalled with a rounded morphology adjacent to blasts, whereas in mice engrafted with the relapsed CD19−CD123+ leukemia, only CART123 cells arrested next to tumor cells (CART123 80.9%+/−5.1 vs CART19 12.4%+/−2.2) (FIGS. 53B and 53C). These findings indicate that in CD19-negative relapsed ALL only CART123 were able to establish productive synapses with the leukemia cells (GFP) and thus reduced their motility, whereas CART19 cells continued sampling and moving in the environment without recognizing the leukemia blasts.

### The Combination of CART123 and CART19 is Able to Prevent CD19-Negative Relapses

[1529] CART123 proved to be effective in the treatment of CD19-negative relapses occurring after CD19-directed therapies in a preclinical model of CART19 resistance. However, a combinatorial approach could treat active CD19-positive disease while simultaneously preventing antigen-loss relapses. In order to test this hypothesis the emerging clinical problem of B-ALL with a potential for CD19-negative escape was modeled by injecting primary CD19- and CD19+ disease together into NSG mice. Mice were then randomized to receive control T cells (UTD), CART19 or the combination of CART19 and CART123, with the same total dose of T cells (FIG. 54A). As shown in FIG. 54B, mice treated with control T cells had progression of both leukemia clones and CART19 showed rapid progression mostly of the CD19-neg disease (red). On the contrary mice treated with the combination of CART123 and CART19 showed clearance of the disease and improved overall survival, as shown in FIG. 54C. Analysis of mice sacrificed at the end of the experiment showed no evidence of residual leukemia in the pooled CAR T cell group. In contrast, mice with progressive disease after CART19 monotherapy retained the expected CD19 negative phenotype (FIG. 54D).

[1530] Lastly, T cells were transduced with 2 lentiviruses, one carrying CAR19 and the other CAR123 in order to develop a CART able to be activated by both CD19 and/or CD123. As shown in FIG. 55A, four differently transduced T cell subsets were detected: CAR19 and CAR123 double negative, CAR19 single positive, CAR123 single positive and double positive CAR19/CAR123 T cells. These four subsets were sorted and their functionality and specificity was tested against K562-WT, K562 CD19+ or K562 CD123+. FIG. 55B shows the results of a CD107a degranulation assay where the single positive subsets respond to their specific target while only the double positive population is able to degranulate in the presence of both CD19 and CD123 expressing K562. In addition, dually-stimulated CART cells exhibited more potent cytotoxicity against a double-positive target in comparison with an equivalent number of single-stimulated CART cells, suggesting a potential increment in efficacy by using a CAR that is triggered by two different antigens (FIG. 55C).

### Discussion

[1531] CD19 directed immunotherapies are changing the paradigm of treatment of relapsing and refractory acute lymphoblastic leukemia. Patients with a previously dismal outcome now have a realistic potential to achieve a complete response and long-term disease remission. However, as shown under some circumstances for leukemia treated with other forms of potent targeted therapy, leukemia cells are able to develop antigen-loss mutations that lead to resistance and relapse. In the case of CART19, two main patterns of relapses have been observed. Patients with early loss of CART19 through failure of persistence are at risk for relapse of the original clone; indeed, minimal residual disease analyses indicate that between 1-6 months of sustained CART activity may be required to completely eradicate malignancy. In contrast, around 50% of relapses occur despite CART19 persistence and are characterized by the occurrence of aCD19-negative leukemia. The latter observation implicates potent selective pressure by CART19. Notably, CD19-negative relapses have also occurred after blinatumomab therapy although these represent the minority of relapse occurrences after this arguably less potent therapy. There are multiple potential mechanisms for the development of CD19-negative disease. One of these is the selection and relative survival advantage of CD19-negative clones that were present at baseline in very low frequency, and this was initially considered the most likely factor leading to CD19-negative relapses. More recently other mechanisms, such the dysregulation of the splicing of CD19 have also been considered important. Here it is shown for the first time that rare CD19-ve blasts in B-ALL can contain the hallmark cytogenetic abnormalities found in the more common CD19-positive leukemia blasts, confirming this as a potential mechanism of CD19-negative relapse. We confirmed these findings by demonstrating that CD123+CD19-ve blasts can engraft in immunodeficient mice, indicating that CD123 may be a marker of leukemic stem cells in B-ALL as it is in AML.

[1532] The goal of this study was to define novel strategies to treat patients relapsing with antigen loss after CD19-directed therapies. CD123 was highly expressed in the majority of B-ALL, and in particular CD123 remains expressed in those relapsing with CD19-negative disease. It was demonstrated the presence of clonal leukemic cells in the CD19− CD123+ population indicating that targeting CD123 in combination with CART19 can increase the likelihood of eradicating sub-clones that could proliferate due to a selective advantage upon CART19 pressure. CD123 has previously been validated as a marker of the leukemic stem cell in AML. Here it was shown that CD123 to be expressed in the immunophenotypically-defined leukemic stem cell (LSC) in ALL, raising the possibility that targeting CD123 on LSC could promote ALL eradication.

[1533] To study the role of CART 123 in antigen-loss relapses a novel xenograft model of CD19-negative relapses was developed from primary blasts derived from a B-ALL patient (CHP101) enrolled in one of the CTL019 trials of the University of Pennsylvania/Children's Hospital of Philadelphia. This patient, at baseline had a classic CD19+CD123+ phenotype but then relapsed after CART19 treatment with CD19−CD123+ disease. Using this model, it was demonstrated CART123 could eradicate the relapsed disease, and in combination with CART19 could prevent antigen-loss relapse. This is the first demonstration of a dual CART combination in a clinically relevant, patient-derived model. In addition, through use of intravital imaging, it was shown that CART cells enter the marrow in less than 24 hours after intravenous injection, search for their targets, and slowdown in order to interact with cognate antigen-bearing cells. Furthermore, it was shown that a dual signaling CART123/19 was more effective than either CART alone or a pool of both CAR, consistent with previously published results.

[1534] Previously, it was shown the pre-clinical efficacy of anti-CD123 chimeric antigen receptor for the treatment of acute myeloid leukemia. CART123 causes hematopoietic toxicity due to recognition of CD123 on hematopoietic stem and progenitor cells, a potentially major challenge to clinical translation as profound stem cell toxicity could lead to permanent myeloablation. It was hypothesized that to minimize hematopoietic toxicity, a novel construct that activated T cells only upon co-engagement of CD19 and CD123 simultaneously could obviate this hematopoietic toxicity. Here it was found that CART cells receiving an activating signal from CD19 recognition and a stimulatory signal from CD123 recognition could kill B-ALL cells as well as avoid the profound hematopoietic toxicity that we have previously described. Although this concept was previously published using an artificial system of CD19/PSMA recognition, this clinically relevant construct represents a major advance in the field with a relatively clear path to clinical translation. Notably, although such a dual CAR design will likely be associated with reduced toxicity, it may leave unaddressed the issue of antigen loss relapse by making CAR recognition more, rather than less restrictive. However, if targeting of CD123 successfully eradicates ALL stem cells, this approach could be both safe and efficacious.

[1535] In summary, demonstrated here is a novel and effective strategy to the treatment of B-ALL by targeting CD123. This approach is particularly attractive since CD123 is expressed in rare CD19-negative malignant cells in some patients with B-ALL and is retained in antigen-loss relapses occurring after CD19-directed immunotherapies. Moreover, the combination of CART19 with CART123 can prevent the occurrence of CD19-negative relapses.

### Example 18: Low Dose RAD001 Stimulates CART Proliferation in a Cell Culture Model

[1536] The effect of low doses of RAD001 on CART cell proliferation in vitro was evaluated by co-culturing CART-expressing cells with target cells in the presence of different concentrations of RAD001.

[1537] Materials and Methods

[1538] Generation of CAR-Transduced T Cells

[1539] A humanized, anti-human CD19 CAR (huCART19) lentiviral transfer vector was used to produce the genomic material packaged into VSVg pseudotyped lentiviral particles. The amino acid and nucleotide sequence of the humanized anti-human CD19 CAR (huCART19) is CAR 1, ID 104875, described in PCT publication, WO2014/153270, filed Mar. 15, 2014, and is designated SEQ ID NOs. 85 and 31 therein.

[1540] Lentiviral transfer vector DNA is mixed with the three packaging components VSVg env, gag/pol and rev in combination with lipofectamine reagent to transfect Lenti-X 293T cells. Medium is changed after 24 h and 30 h thereafter, the virus-containing media is collected, filtered and stored at −80° C. CARTs are generated by transduction of fresh or frozen naïve T cells obtained by negative magnetic selection of healthy donor blood or leukopak. T cells are activated by incubation with anti-CD3/anti-CD28 beads for 24 h, after which viral supernatant or concentrated virus (MOI=2 or 10, respectively) is added to the cultures. The modified T cells are allowed to expand for about 10 days. The percentage of cells transduced (expressing the CARs on the cell surface) and the level of CAR expression (relative fluorescence intensity, Geo Mean) are determined by flow cytometric analysis between days 7 and 9. The combination of slowing growth rate and T cell size approaching −350 fL determines the state for T cells to be cryopreserved for later analysis.

[1541] Evaluating Proliferation of CARTs

[1542] To evaluate the functionality of CARTs, the T cells are thawed and counted, and viability is assessed by Cellometer. The number of CAR-positive cells in each culture is normalized using non-transduced T cells (UTD). The impact of RAD001 on CARTs was tested in titrations with RAD001, starting at 50 nM. The target cell line used in all co-culture experiments is NALM6 (Nalm-6), a human pre-B cell acute lymphoblastic leukemia (ALL) cell line expressing CD19 and transduced to express luciferase.

[1543] For measuring the proliferation of CARTs, T cells are cultured with target cells at a ratio of 1:1. The assay is run for 4 days, when cells are stained for CD3, CD4, CD8 and CAR expression. The number of T cells is assessed by flow cytometry using counting beads as reference.

[1544] Results

[1545] The proliferative capacity of CART cells was tested in a 4 day co-culture assay. The number of CAR-positive CD3-positive T cells (dark bars) and total CD3-positive T cells (light bars) was assessed after culturing the CAR-transduced and non-transduced T cells with NALM6 (Nalm-6) (FIG. 59). huCART19 cells expanded when cultured in the presence of less than 0.016 nM of RAD001, and to a lesser extent at higher concentrations of the compound. Importantly, both at 0.0032 and 0.016 nM RAD001 the proliferation was higher than observed without the addition of RAD001. The non-transduced T cells (UTD) did not show detectable expansion.

### Example 19: Low Dose RAD001 Stimulates CART Expansion In Vivo

[1546] This example evaluates the ability of huCAR19 cells to proliferate in vivo with different concentrations of RAD001.

[1547] Materials and Methods:

[1548] NALM6-luc cells: The NALM6 human acute lymphoblastic leukemia (ALL) cell line was developed from the peripheral blood of a patient with relapsed ALL. The cells were then tagged with firefly luciferase. These suspension cells grow in RPMI supplemented with 10% heat inactivated fetal bovine serum.

[1549] Mice: 6 week old NSG (NOD.Cg-PrkdcscidIl2rgtm1Wjl/SzJ) mice were received from the Jackson Laboratory (stock number 005557).

[1550] Tumor implantation: NALM6-luc cells were grown and expanded in vitro in RPMI supplemented with 10% heat inactivated fetal bovine serum. The cells were then transferred to a 15 ml conical tube and washed twice with cold sterile PBS. NALM6-luc cells were then counted and resuspended at a concentration of 10×10⁶ cells per milliliter of PBS. The cells were placed on ice and immediately (within one hour) implanted in the mice. NALM6-luc cells were injected intravenously via the tail vein in a 100 μl volume, for a total of 1×10⁶ cells per mouse.

[1551] CAR T cell dosing: Mice were administered 5×10⁶ CAR T cells 7 days after tumor implantation. Cells were partially thawed in a 37 degree Celsius water bath and then completely thawed by the addition of 1 ml of cold sterile PBS to the tube containing the cells. The thawed cells were transferred to a 15 ml falcon tube and adjusted to a final volume of 10 mls with PBS. The cells were washed twice at 1000 rpm for 10 minutes each time and then counted on a hemocytometer. T cells were then resuspended at a concentration of 50×10⁶ CAR T cells per ml of cold PBS and kept on ice until the mice were dosed. The mice were injected intravenously via the tail vein with 100 μl of the CAR T cells for a dose of 5×10⁶ CAR T cells per mouse. Eight mice per group were treated either with 100 μl of PBS alone (PBS), or humanized CD19 CAR T cells.

[1552] RAD001 dosing: A concentrated micro-emulsion of 50 mg equal to 1 mg RAD001 was formulated and then resuspended in D5W (dextrose 5% in water) at the time of dosing. Mice were orally dosed daily (via oral gavage) with 200 μl of the desired doses of RAD001.

[1553] PK analysis: Mice were dosed daily with RAD001 starting 7 days post tumor implantation. Dosing groups were as follows: 0.3 mg/kg, 1 mg/kg, 3 mg/kg, and 10 mg/kg. Mice were bled on days 0 and 14 following the first and last dose of RAD001, at the following time points for PK analysis: 15 minutes, 30 minutes, 1 hour, 2 hours, 4 hours, 8 hours, 12 hours, and 24 hours.

[1554] Results:

[1555] The expansion and pharmacokinetics of RAD001 was tested in NSG mice with NALM6-luc tumors. Daily oral dosing of RAD001 alone did not have an impact on the growth of NALM6-luc tumors (FIG. 60). The pharmacokinetic analysis of RAD001 shows that it is fairly stable in the blood of tumor bearing mice (FIGS. 61A and 61B). Both the day 0 and day 14 PK analyses show that the RAD001 concentrations in the blood is above 10 nm even 24 hours after dosing at the lowest dose tested (0.3 mg/kg).

[1556] Based on these doses, huCAR19 CAR T cells were dosed with and without RAD001 to determine the proliferative ability of these cells. The highest dose used was 3 mg/kg based on the levels of RAD001 in the blood 24 hours after dosing. As the concentration of RAD001 was above 10 nM 24 hours after the final dose of RAD001, several lower doses of RAD001 were used in the in vivo study with CAR T cells. The CAR T cells were dosed IV one day prior to the start of the daily oral RAD001 dosing. Mice were monitored via FACS for T cell expansion.

[1557] The lowest doses of RAD001 show an enhanced proliferation of the CAR T cells (FIGS. 62A and 62B). This enhanced proliferation is more evident and prolonged with the CD4+ CAR T cells than the CD8+ CAR T cells. However, with the CD8+ CAR T cells, enhanced proliferation can be seen at early time points following the CAR T cell dose.

### Example 20: Certain Patients with Primary DLBCL Show CD3+/PD1+ Dual Positive Cancer Cells

[1558] Although there have been compelling advances in the cancer immunotherapy space recently in the form of chimeric antigen receptor (CAR) modified T-cells and checkpoint inhibitors, advanced tools to explore the therapeutic mechanisms of their combination are not widely available. To address this growing need, a robust quantitative fluorescent immunohistochemistry platform using multiplex AQUA (Automated Quantitative Analysis) technology was developed to evaluate checkpoint inhibitor expression, enumerate CAR T cells and determine the interaction between tumor cells and immune cells via novel co-localization algorithms. The utility of this method was characterized both in preclinical- and clinical model systems. In an immunodeficient mouse model of B-cell lymphoma, homing of CAR T cells to malignant B-cells in primary lymphoid organs was evaluated. The phenotype and functional status of the CART cells via multiplex analyses of CD4, CD8, PD1 and FOXP3 expression was determined. Additionally, to enable combination immunotherapies in Diffuse Large B-Cell Lymphoma (DLBCL) setting, prevalence of adaptive immune resistance mechanisms in the form of PD1 and PD-L1 expression in immune- and tumor cell compartments was examined via landmarks created by cytoplasmic and nuclear stains in both primary and secondary biopsies from DLBCL patients (n=63). To support patient selection for CAR T trials, expression and prevalence of relevant tumor antigens that could not be scored reproducibly by traditional methods were quantified to yield objective cut points. These quantitative multiplexed IHC methods for optimal selection of patients can be utilized in upcoming novel combination immunotherapy trials.

[1559] Sample preparation, imaging, and analysis of imaging for DLBCL tissue samples was performed on primary DLBCL (n=49) and secondary DLBCL (15) human patients.

[1560] Sample preparation. Formalin fixed paraffin embedded (FFPE) tissue samples were dewaxed. The slides were then rehydrated through a series of xylene to alcohol washes before incubating in distilled water. Heat-induced antigen retrieval was then performed using elevated pressure and temperature conditions, allowed to cool, and transferred to Tris-buffered saline. Staining was then performed where the following steps were carried out. First, endogenous peroxidase was blocked followed by incubation with a protein-blocking solution to reduce nonspecific antibody staining. Next, the slides were stained with a mouse anti-PD1 primary antibody. Slides were then washed before incubation with an anti-mouse HRP secondary antibody. Slides were washed and then PD-1 staining was detected using TSA+ Cy® 5 (Perkin Elmer). Primary and secondary antibody reagents were then removed via microwave. The slides were again washed before staining with a rabbit anti-CD3 primary antibody. Slides were washed and then incubated with a cocktail of anti-rabbit HRP secondary antibody plus 4′,6-diamidino-2-phenylindole (DAPI). Slides were washed and then CD3 staining was detected using TSA-Cy® 3 (Perkin Elmer). Slides were washed a final time before they were cover-slipped with mounting media and allowed to dry overnight at room temperature.

[1561] Sample imaging and analysis. Fluorescence images were then acquired using the Vectra 2 Intelligent Slide Analysis System using the Vectra software version 2.0.8 (Perkin Elmer). First, monochrome imaging of the slide at 4× magnification using DAPI was conducted. An automated algorithm (developed using inForm) was used to identify areas of the slide containing tissue.

[1562] The areas of the slide identified as containing tissue were imaged at 4× magnification for channels associated with DAPI (blue), Cy®3 (green), and Cy® 5 (red) to create RGB images. These 4× magnification images were processed using an automated enrichment algorithm (developed using inForm) in field of view selector to identify and rank possible 20× magnification fields of view according to the highest Cy® 3 expression.

[1563] The top 40 fields of view were imaged at 20× magnification across DAPI, Cy®3, and Cy® 5 wavelengths. Raw images were reviewed for acceptability, and images that were out of focus, lacked any tumor cells, were highly necrotic, or contained high levels of fluorescence signal not associated with expected antibody localization (i.e., background staining) were rejected prior to analysis. Accepted images were processed using AQUAduct (Perkin Elmer), wherein each fluorophore was spectrally unmixed by spectral unmixer into individual channels and saved as a separate file.

[1564] The processed files were further analyzed using AQUAnalysis™ or through a fully automated process using AQUAserve™. Each DAPI image was processed by cell masker to identify all cell nuclei within that image, and then dilated by 2 pixels to represent the approximate size of an entire cell. This resulting mask represented all cells within that image. Each Cy® 5 image was processed by biomarker masker to create a binary mask of all cells that are PD-1-positive. Each Cy® 3 image was processed by biomarker masker to create a binary mask of all cells that are CD3-positive. The binary masks for all cells PD-1-positive and CD3-positive were combined to create a binary mask of all cells that are double positive for PD-1 and CD3. The % biomarker positivity (PBP) for all CD3 cells expressing PD-1 was derived, using positivity calculator, by dividing the total area, measured in pixels and determined by area evaluator, of the mask of all PD-1-positive tumor cells with the total area, measured in pixels and determined by area evaluator, of the mask of all CD3-positive cells. Representative values of PBP for all CD3-positive cells expressing PD-1 in primary and secondary DLBCL human samples are shown in FIG. 63. CD3 and PD-1 status showed that prevalence rates of CD3+/PD-1+ cells in primary is higher than secondary DLBCL setting, providing an opportunity to select patient for either single or combination treatment.

[1565] A similar experiment was performed in which PD-L1 was detected using a rabbit anti-PDL1 primary antibody and TSA+Cy5 (Perkin Elmer) on DLBCL tissue samples from primary DLBCL human patients. PD1 and CD3 were also detected on the same samples. The experiment showed that tumor microenvironments comprise cells that express PD1, CD3, and PDL1. The experiment also identified a sub-population of cells that is CD3+PD1+ (data not shown). These results support the model that a tumor microenvironment fosters immune suppressive cells that can be targeted with agents specific to PD1+ or PD-L1+ cells.

### Example 21: Mutually Exclusive Expression of CD19 and PD-L1 in Samples Comprising DLBCL Cells

[1566] Sample preparation. Formalin fixed paraffin embedded (FFPE) tissue samples were dewaxed. The slides were then rehydrated through a series of xylene to alcohol washes before incubating in distilled water. Heat-induced antigen retrieval was then performed using elevated pressure and temperature conditions, allowed to cool, and transferred to Tris-buffered saline. Staining was then performed where the following steps were carried out. First, endogenous peroxidase was blocked followed by incubation with a protein-blocking solution to reduce nonspecific antibody staining. Next, the slides were stained with a rabbit anti-PDL1 primary antibody. Slides were then washed before incubation with an anti-rabbit HRP secondary antibody. Slides were washed and then PDL1 staining was detected using TSA+ Cy® 3 (Perkin Elmer). Primary and secondary antibody reagents were then removed via microwave. The slides were again washed before staining with a mouse anti-CD19 primary antibody. Slides were washed and then incubated with a cocktail of anti-mouse HRP secondary antibody plus 4′,6-diamidino-2-phenylindole (DAPI). Slides were washed and then CD19 staining was detected using TSA-Cy® 5 (Perkin Elmer). Slides were washed a final time before they were cover-slipped with mounting media and allowed to dry overnight at room temperature.

[1567] Sample imaging and analysis. Fluorescence images were then acquired using the Vectra 2 Intelligent Slide Analysis System using the Vectra software version 2.0.8 (Perkin Elmer). First, monochrome imaging of the slide at 4× magnification using DAPI was conducted. An automated algorithm (developed using inForm) was used to identify areas of the slide containing tissue.

[1568] The areas of the slide identified as containing tissue were imaged at 4× magnification for channels associated with DAPI (blue), Cy®3 (green), and Cy® 5 (red) to create RGB images. These 4× magnification images were processed using an automated enrichment algorithm (developed using inForm) in field of view selector to identify and rank possible 20× magnification fields of view according to the highest Cy® 3 expression.

[1569] The top 40 fields of view were imaged at 20× magnification across DAPI, Cy®3, and Cy® 5 wavelengths. Raw images were reviewed for acceptability, and images that were out of focus, lacked any tumor cells, were highly necrotic, or contained high levels of fluorescence signal not associated with expected antibody localization (i.e., background staining) were rejected prior to analysis. Accepted images were processed using AQUAduct (Perkin Elmer), wherein each fluorophore was spectrally unmixed by spectral unmixer into individual channels and saved as a separate file.

[1570] The processed files were further analyzed using AQUAnalysis™ or through a fully automated process using AQUAserve™ as described in the previous Example.

[1571] Representative values of PBP for all CD19-positive and PD-L1-positive cells in primary and secondary DLBCL human samples are shown in FIG. 64. CD19 and PDL1 expression varied in DLBCL samples. CD19 and PDL1 expression tended to be mutually exclusive, i.e., in general, a given cell expressed CD19 or PD-L1 but not both. While not wishing to be bound by theory, this may be because CD19 is expressed in DLBCL tumor cells while PD-L1 is expressed in non-tumor cells, e.g., cells that support the tumor microenvironment. This observation suggests that a combination therapy of a CD19 inhibitor (e.g., a CD19 CAR-expressing cell) and an inhibitor of PD-L1 signalling may be useful for targeting these two populations of cells.

[1572] A similar experiment was performed to, e.g., demonstrate the capability of AQUA analysis to monitor CART19 efficacy. This study monitored CD19, CD3, and the CART19 nucleic acid in samples comprising mixed cells lines with CART19+ Jurkat cells and CD19+ REH cells. CD19 and CD3 proteins were detected by antibodies, and CART19 was detected using an RNA probe against the 3′ UTR of the CAR nucleic acid. The experiment showed that the cell line samples comprise cells that express CD19, CD3, and the CART19 (data not shown). The experiment also showed that the cell line samples comprise a sub-population of cells that is CD3+/CART19+ (data not shown). Proximity analysis was performed, which showed that CART19 cells were physically proximal to CD19+ cells (data not shown). These experiments support the model that CD3+ CART19 cells infiltrate a tumor microenvironment comprising CD19+ cells and physical locations of CD19 and CART19 cells translate into efficacy of the CART19 therapy.

### Example 22: Bicistronic Expression of CARs

[1573] In this Example, the efficacy of two types of cell populations were compared. In the first cell population, referred to as “pooled”, each cell expresses one CAR. A first plurality of cells was transduced with CD19 CAR, a second plurality of cells was transduced with CD22 CAR or CD123 CAR, and then the two pluralities of cells were pooled. In the second type of cell population, a plurality of cells was transduced with a bicistronic vector expressing CD19 CAR and a second CAR, so that most or all of the cells expressed both constructs. The second CAR was CD22 CAR in some experiments and CD123 CAR in others. These cell populations are illustrated in FIG. 65.

[1574] Two novel constructs, diagrammed in FIG. 66, were generated using the P2A system in order to express two full-length CARs in the same T cell using a single bicistronic lentiviral vector. T cells were expanded according to a standard protocol and transduced using a single lentivirus carrying both CAR19 and CAR123 (multiplicity of infection, MOI=3). A similar transduction was performed for CAR19 and CAR22 in the same T cell population obtained using the described bicistronic lentiviral vector. FIG. 67 shows co-expression of CD19 and CD22 CARs. Distinct populations based on the specific expression of CAR19 and/or CAR123 can be recognized, including a Dual CAR19+/CAR123+ population and a double negative population (FIG. 68A).

[1575] The cells transduced with bicistronic CD19 CAR and CD123 CAR was compared with pooled cells expressing either CD19 or CD123 CAR (FIG. 68B). NSG mice were engrafted with a B-ALL cell line (NALM-6, CBG+). At day 7 mice were randomized based on tumor burden (BLI, bioluminescence) to receive control T cells (UTD), CART19, CART123, the 1:1 pooled combination of CART123 and CART19 or the Dual CART19/123 (same total number of CAR+ cells). CD19 CAR-expressing cells alone (squares) and CD123 CAR-expressing cells alone (triangles) both showed initial effectiveness compared to the control (circles) followed by rising levels of leukemic cells. Pooled cells expressing CD19 or CD123 (diamond) also showed initial effectiveness followed by rising levels of leukemic cells. In contrast, cells transfected with the bicistronic vector (inverted triangles, “dual CART”) maintained a prolonged response at least 60 days after treatment. This experiment indicates that dual CARTs exert a potent anti-leukemia effect that is not only superior to a single CART treatment but is superior to a pooled CART cells.

### Example 23: CART22 is Effective Against CD19-Neg B-ALL in an Animal Model

[1576] CD19-negative B-ALL cells were tested for responsiveness to CD19 CAR-expressing cells and CD22 CAR-expressing cells in an animal model. One million CD19-negative B-ALL cells were infused into mice on day 0, and 2e6 CAR+ T cells were infused on day 7 (after randomization). Tumor burden was measured by bioluminescence. As shown in FIG. 69, while the cancer progressed in the negative control mice and CART19-treated mice, CART22 is able to clear CD19-negative ALL in NSG xenografts.

[1577] The assay was conducted as follows: 1e6 CD19-neg ALL cells (CBG+) were injected in NSG mice. At day 5 mice were randomized to receive either 2e6 control untransduced T cells (UTD), CART19 or CART22 (m971 scFv). Mice were then followed up for tumor burden (bioluminescence).

### Example 24: Low Levels of Immune Checkpoint Molecules are Associated with Improved Outcomes

[1578] Immune checkpoint molecules (PD-L1, PD1, LAG3, and TIM3) were detected in samples from lymphoma patients by immunohistochemistry. Positive and negative control tissues and cell lines were also performed. The immune checkpoint expression analysis was performed using quantitative image analysis on a region of interest which can include tumor cells and non-tumor cells such as immune cells. Samples were taken from tissue, lymph node, or bone marrow.

[1579] Immune checkpoint protein expression was compared in complete responders (CR) and patients having progressive disease (PD) following treatment with CD19-targeting CAR therapy. As shown in FIG. 70, the CR patients tended to have low levels of PD-L1, PD1, LAG3, and TIM3 before and after treatment, while PD patients tended to have high levels of these molecules before and after treatment. This Example supports combination therapy with a CAR-expressing cell and an immune checkpoint inhibitor, and supports testing to determine immune checkpoint molecule levels in patients receiving a CAR therapy.

### Example 25: Functional Assays of CD22 CAR-Expressing Cells

[1580] Several CD22 CAR constructs were functionally validated in an NFAT assay. Briefly the experiments were performed as follows. A lentiviral vector (pELPS) carrying a nucleic acid, encoding a CD22 CAR with a CD22-binding scFv domain was introduced by electroporation into a Jurkat T cell line modified to express luciferase under the control of an NFAT response element (JNL). The cells were cultured and allowed to express the CAR construct. The electroporated cells were applied to a plate coated with the target antigen (CD22). Detection of luciferase signal in the coated plate was indicative of binding activity of the CD22 CAR to its antigen, leading to activation of the T cells and expression of luciferase.

[1581] FIG. 71 is a graph showing the activation (in RLU) of several CD22 CAR constructs in the presence and absence of a m971 scFv competitor. These results indicate that CD22-53 and CD22-12, and a subset of the other scFvs, bind the antigen approximately as well as the m971 positive control. The results also indicate that the different scFvs compete with m971 to different extents.

[1582] Sixteen additional human CD22 binding domains were tested and found to have weak binding activity (data not shown), so were not pursued further.

[1583] FIG. 72 is a graph showing the activation (in RLU) of several CD22 CAR-expressing JNL cells including CD22-57, CD22-58, CD22-59, CD22-60, CD22-61, CD22-62, and CD22-63, the scFv sequences of which are provided herein. Three different target proteins (CD22-FL-Fc, CD22-D567-Fc, and CD22-D67) were used to coat the tissue culture plates; a negative control (Fc) was also included. A mesothelin binding CAR (Meso-G07) was used as a negative control. CD22-12 and CD22-53 were used as positive controls. The experiment indicated that all CARs (CD22-57, CD22-58, CD22-59, CD22-60, CD22-61, CD22-62, and CD22-63) were functional in this assay. Furthermore, these results indicated that the CARs tested (including CD22-12 and -53) bind to the domains 6 and 7 of CD22. Domain mapping was performed on CD22 binding domains. Three different forms of antigens were used: CD22 full-length with all 7 external domains, Domain567 (in which domains 1-4 were deleted) and Domain67 (in which domains 1-5 were deleted). While not wishing to be bound by theory, it appears that the binding of various CD22 clones maps to the epitopes illustrated in FIG. 75.

[1584] CD22 CAR constructs were also tested for the ability to promote secretion of IFN-gamma and IL-2. Briefly, transduced primary T cells from healthy donors expressing the different CD22 CARs were co-cultured with the CD22-positive target cells Raji-Luc and Daudi-Luc as well as the negative control K562-Luc. T cells and target cell were cultured in an effector-to-target cell ratio (E:T) of 10 to 1. Supernatants were harvested after 20-hr co-culture. FIG. 73 shows three bar graphs indicating IFN-gamma production in pg/mL. Co-culture with Raji-Luc (top panel) and Daudi-luc (center panel) cell lines induced IFN-gamma secretion by hCD22-12, hCD22-53 CAR T cells as well as the two positive controls CAR19 and m971-HL. Notably, highest amounts were observed when the hCD22-53 cells were tested, and to a lesser extent, when the hCD22-12 cells were tested. Similar results were observed when Nalm6-Luc, Pfeiffer-Luc, and K562-CD22-Luc, and SEM-Luc cells were tested (data not shown). Minimal IFN-gamma secretion was observed when the K562-Luc negative control cell line was tested (bottom panel).

[1585] CD22-12 showed activity comparable to m971 in cell killing and cytokine secretion assays (Example 9). Two scFvs, named CD22-64 and CD22-65, were produced by affinity maturation of hCD22-12. CAR constructs containing these scFvs were tested for activity in an NFAT assay as described above. As shown in FIG. 74, both CD22-64 and CD22-65 bind CD22 as well or better than CD22-12 and CD22-53, leading to JNL activation. The bars in the figure represent, from left to right, CD22 full length-Fc; CD22 D567-Fc; and an Fc only negative control used for coating of the plates. Testing four variants of CD22-12 suggested that LCDR3 and HCDR3 contributed to binding to some extent (data not shown), and that HCDR3 may tolerate more mutations than LCDR3.

### EQUIVALENTS

[1586] The disclosures of each and every patent, patent application, and publication cited herein are hereby incorporated herein by reference in their entirety. While this invention has been disclosed with reference to specific aspects, it is apparent that other aspects and variations of this invention may be devised by others skilled in the art without departing from the true spirit and scope of the invention. The appended claims are intended to be construed to include all such aspects and equivalent variations.

The application's sequence listing, which the Patent Office published only in electronic form, follows.

SEQUENCE LISTING (1529 sequences)

SEQ ID NO: 1 - protein, 242 aa, synthetic construct
  REGION 1..242: note = source = /note="Description of Artificial Sequence: Synthetic polypeptide"
EIVMTQSPATLSLSPGERATLSCRASQDISKYLNWYQQKPGQAPRLLIYHTSRLHSGIPARFSGSGSGTDYTLTISSLQPEDFAVYFCQQGNTLPYTFGQGTKLEIKGGGGSGGGGSGGGGSQVQLQESGPGLVKPSETLSLTCTVSGVSLPDYGVSWIRQPPGKGLEWIGVIWGSETTYYSSSLKSRVTISKDNSKNQVSLKLSSVTAADTAVYYCAKHYYYGGSYAMDYWGQGTLVTVSS

SEQ ID NO: 2 - protein, 242 aa, synthetic construct
  REGION 1..242: note = source = /note="Description of Artificial Sequence: Synthetic polypeptide"
EIVMTQSPATLSLSPGERATLSCRASQDISKYLNWYQQKPGQAPRLLIYHTSRLHSGIPARFSGSGSGTDYTLTISSLQPEDFAVYFCQQGNTLPYTFGQGTKLEIKGGGGSGGGGSGGGGSQVQLQESGPGLVKPSETLSLTCTVSGVSLPDYGVSWIRQPPGKGLEWIGVIWGSETTYYQSSLKSRVTISKDNSKNQVSLKLSSVTAADTAVYYCAKHYYYGGSYAMDYWGQGTLVTVSS

SEQ ID NO: 3 - protein, 242 aa, synthetic construct
  REGION 1..242: note = source = /note="Description of Artificial Sequence: Synthetic polypeptide"
QVQLQESGPGLVKPSETLSLTCTVSGVSLPDYGVSWIRQPPGKGLEWIGVIWGSETTYYSSSLKSRVTISKDNSKNQVSLKLSSVTAADTAVYYCAKHYYYGGSYAMDYWGQGTLVTVSSGGGGSGGGGSGGGGSEIVMTQSPATLSLSPGERATLSCRASQDISKYLNWYQQKPGQAPRLLIYHTSRLHSGIPARFSGSGSGTDYTLTISSLQPEDFAVYFCQQGNTLPYTFGQGTKLEIK

SEQ ID NO: 4 - protein, 242 aa, synthetic construct
  REGION 1..242: note = source = /note="Description of Artificial Sequence: Synthetic polypeptide"
QVQLQESGPGLVKPSETLSLTCTVSGVSLPDYGVSWIRQPPGKGLEWIGVIWGSETTYYQSSLKSRVTISKDNSKNQVSLKLSSVTAADTAVYYCAKHYYYGGSYAMDYWGQGTLVTVSSGGGGSGGGGSGGGGSEIVMTQSPATLSLSPGERATLSCRASQDISKYLNWYQQKPGQAPRLLIYHTSRLHSGIPARFSGSGSGTDYTLTISSLQPEDFAVYFCQQGNTLPYTFGQGTKLEIK

SEQ ID NO: 5 - protein, 247 aa, synthetic construct
  REGION 1..247: note = source = /note="Description of Artificial Sequence: Synthetic polypeptide"
EIVMTQSPATLSLSPGERATLSCRASQDISKYLNWYQQKPGQAPRLLIYHTSRLHSGIPARFSGSGSGTDYTLTISSLQPEDFAVYFCQQGNTLPYTFGQGTKLEIKGGGGSGGGGSGGGGSGGGGSQVQLQESGPGLVKPSETLSLTCTVSGVSLPDYGVSWIRQPPGKGLEWIGVIWGSETTYYSSSLKSRVTISKDNSKNQVSLKLSSVTAADTAVYYCAKHYYYGGSYAMDYWGQGTLVTVSS

SEQ ID NO: 6 - protein, 247 aa, synthetic construct
  REGION 1..247: note = source = /note="Description of Artificial Sequence: Synthetic polypeptide"
EIVMTQSPATLSLSPGERATLSCRASQDISKYLNWYQQKPGQAPRLLIYHTSRLHSGIPARFSGSGSGTDYTLTISSLQPEDFAVYFCQQGNTLPYTFGQGTKLEIKGGGGSGGGGSGGGGSGGGGSQVQLQESGPGLVKPSETLSLTCTVSGVSLPDYGVSWIRQPPGKGLEWIGVIWGSETTYYQSSLKSRVTISKDNSKNQVSLKLSSVTAADTAVYYCAKHYYYGGSYAMDYWGQGTLVTVSS

SEQ ID NO: 7 - protein, 247 aa, synthetic construct
  REGION 1..247: note = source = /note="Description of Artificial Sequence: Synthetic polypeptide"
QVQLQESGPGLVKPSETLSLTCTVSGVSLPDYGVSWIRQPPGKGLEWIGVIWGSETTYYSSSLKSRVTISKDNSKNQVSLKLSSVTAADTAVYYCAKHYYYGGSYAMDYWGQGTLVTVSSGGGGSGGGGSGGGGSGGGGSEIVMTQSPATLSLSPGERATLSCRASQDISKYLNWYQQKPGQAPRLLIYHTSRLHSGIPARFSGSGSGTDYTLTISSLQPEDFAVYFCQQGNTLPYTFGQGTKLEIK

SEQ ID NO: 8 - protein, 247 aa, synthetic construct
  REGION 1..247: note = source = /note="Description of Artificial Sequence: Synthetic polypeptide"
QVQLQESGPGLVKPSETLSLTCTVSGVSLPDYGVSWIRQPPGKGLEWIGVIWGSETTYYQSSLKSRVTISKDNSKNQVSLKLSSVTAADTAVYYCAKHYYYGGSYAMDYWGQGTLVTVSSGGGGSGGGGSGGGGSGGGGSEIVMTQSPATLSLSPGERATLSCRASQDISKYLNWYQQKPGQAPRLLIYHTSRLHSGIPARFSGSGSGTDYTLTISSLQPEDFAVYFCQQGNTLPYTFGQGTKLEIK

SEQ ID NO: 9 - protein, 247 aa, synthetic construct
  REGION 1..247: note = source = /note="Description of Artificial Sequence: Synthetic polypeptide"
EIVMTQSPATLSLSPGERATLSCRASQDISKYLNWYQQKPGQAPRLLIYHTSRLHSGIPARFSGSGSGTDYTLTISSLQPEDFAVYFCQQGNTLPYTFGQGTKLEIKGGGGSGGGGSGGGGSGGGGSQVQLQESGPGLVKPSETLSLTCTVSGVSLPDYGVSWIRQPPGKGLEWIGVIWGSETTYYNSSLKSRVTISKDNSKNQVSLKLSSVTAADTAVYYCAKHYYYGGSYAMDYWGQGTLVTVSS

SEQ ID NO: 10 - protein, 247 aa, synthetic construct
  REGION 1..247: note = source = /note="Description of Artificial Sequence: Synthetic polypeptide"
QVQLQESGPGLVKPSETLSLTCTVSGVSLPDYGVSWIRQPPGKGLEWIGVIWGSETTYYNSSLKSRVTISKDNSKNQVSLKLSSVTAADTAVYYCAKHYYYGGSYAMDYWGQGTLVTVSSGGGGSGGGGSGGGGSGGGGSEIVMTQSPATLSLSPGERATLSCRASQDISKYLNWYQQKPGQAPRLLIYHTSRLHSGIPARFSGSGSGTDYTLTISSLQPEDFAVYFCQQGNTLPYTFGQGTKLEIK

SEQ ID NO: 11 - protein, 242 aa, synthetic construct
  REGION 1..242: note = source = /note="Description of Artificial Sequence: Synthetic polypeptide"
EIVMTQSPATLSLSPGERATLSCRASQDISKYLNWYQQKPGQAPRLLIYHTSRLHSGIPARFSGSGSGTDYTLTISSLQPEDFAVYFCQQGNTLPYTFGQGTKLEIKGGGGSGGGGSGGGGSQVQLQESGPGLVKPSETLSLTCTVSGVSLPDYGVSWIRQPPGKGLEWIGVIWGSETTYYNSSLKSRVTISKDNSKNQVSLKLSSVTAADTAVYYCAKHYYYGGSYAMDYWGQGTLVTVSS

SEQ ID NO: 12 - protein, 242 aa, synthetic construct
  REGION 1..242: note = source = /note="Description of Artificial Sequence: Synthetic polypeptide"
QVQLQESGPGLVKPSETLSLTCTVSGVSLPDYGVSWIRQPPGKGLEWIGVIWGSETTYYNSSLKSRVTISKDNSKNQVSLKLSSVTAADTAVYYCAKHYYYGGSYAMDYWGQGTLVTVSSGGGGSGGGGSGGGGSEIVMTQSPATLSLSPGERATLSCRASQDISKYLNWYQQKPGQAPRLLIYHTSRLHSGIPARFSGSGSGTDYTLTISSLQPEDFAVYFCQQGNTLPYTFGQGTKLEIK

SEQ ID NO: 13 - protein, 21 aa, synthetic construct
  REGION 1..21: note = source = /note="Description of Artificial Sequence: Synthetic peptide"
MALPVTALLLPLALLLHAARP

SEQ ID NO: 14 - protein, 45 aa, synthetic construct
  REGION 1..45: note = source = /note="Description of Artificial Sequence: Synthetic polypeptide"
TTTPAPRPPTPAPTIASQPLSLRPEACRPAAGGAVHTRGLDFACD

SEQ ID NO: 15 - protein, 24 aa, synthetic construct
  REGION 1..24: note = source = /note="Description of Artificial Sequence: Synthetic peptide"
IYIWAPLAGTCGVLLLSLVITLYC

SEQ ID NO: 16 - protein, 42 aa, synthetic construct
  REGION 1..42: note = source = /note="Description of Artificial Sequence: Synthetic polypeptide"
KRGRKKLLYIFKQPFMRPVQTTQEEDGCSCRFPEEEEGGCEL

SEQ ID NO: 17 - protein, 112 aa, synthetic construct
  REGION 1..112: note = source = /note="Description of Artificial Sequence: Synthetic polypeptide"
RVKFSRSADAPAYKQGQNQLYNELNLGRREEYDVLDKRRGRDPEMGGKPRRKNPQEGLYNELQKDKMAEAYSEIGMKGERRRGKGHDGLYQGLSTATKDTYDALHMQALPPR

SEQ ID NO: 18 - protein, 5 aa, synthetic construct
  REGION 1..5: note = source = /note="Description of Artificial Sequence: Synthetic peptide"
GGGGS

SEQ ID NO: 19 - protein, 10 aa, synthetic construct
  REGION 1..10: note = source = /note="Description of Artificial Sequence: Synthetic peptide"
GVSLPDYGVS

SEQ ID NO: 20 - protein, 16 aa, synthetic construct
  REGION 1..16: note = source = /note="Description of Artificial Sequence: Synthetic peptide"
VIWGSETTYYNSALKS

SEQ ID NO: 21 - protein, 16 aa, synthetic construct
  REGION 1..16: note = source = /note="Description of Artificial Sequence: Synthetic peptide"
VIWGSETTYYSSSLKS

SEQ ID NO: 22 - protein, 16 aa, synthetic construct
  REGION 1..16: note = source = /note="Description of Artificial Sequence: Synthetic peptide"
VIWGSETTYYQSSLKS

SEQ ID NO: 23 - protein, 16 aa, synthetic construct
  REGION 1..16: note = source = /note="Description of Artificial Sequence: Synthetic peptide"
VIWGSETTYYNSSLKS

SEQ ID NO: 24 - protein, 12 aa, synthetic construct
  REGION 1..12: note = source = /note="Description of Artificial Sequence: Synthetic peptide"
HYYYGGSYAMDY

SEQ ID NO: 25 - protein, 11 aa, synthetic construct
  REGION 1..11: note = source = /note="Description of Artificial Sequence: Synthetic peptide"
RASQDISKYLN

SEQ ID NO: 26 - protein, 7 aa, synthetic construct
  REGION 1..7: note = source = /note="Description of Artificial Sequence: Synthetic peptide"
HTSRLHS

SEQ ID NO: 27 - protein, 9 aa, synthetic construct
  REGION 1..9: note = source = /note="Description of Artificial Sequence: Synthetic peptide"
QQGNTLPYT

SEQ ID NO: 28 - DNA, 5000 bp, synthetic construct
  misc_feature 1..5000: note = /note="This sequence may encompass 50-5000 nucleotides"
  misc_feature 1..5000: note = source = /note="Description of Artificial Sequence: Synthetic polynucleotide"
  misc_feature 1..5000: note = source = /note="See specification as filed for detailed description of substitutions and preferred embodiments"
  source 1..5000: mol_type = other DNA
aaaaaaaaaaaaaaaaaaaaaaaaaaaaaaaaaaaaaaaaaaaaaaaaaaaaaaaaaaaaaaaaaaaaaaaaaaaaaaaaaaaaaaaaaaaaaaaaaaaaaaaaaaaaaaaaaaaaaaaaaaaaaaaaaaaaaaaaaaaaaaaaaaaaaaaaaaaaaaaaaaaaaaaaaaaaaaaaaaaaaaaaaaaaaaaaaaaaaaaaaaaaaaaaaaaaaaaaaaaaaaaaaaaaaaaaaaaaaaaaaaaaaaaaaaaaaaaaaaaaaaaaaaaaaaaaaaaaaaaaaaaaaaaaaaaaaaaaaaaaaaaaaaaaaaaaaaaaaaaaaaaaaaaaaaaaaaaaaaaaaaaaaaaaaaaaaaaaaaaaaaaaaaaaaaaaaaaaaaaaaaaaaaaaaaaaaaaaaaaaaaaaaaaaaaaaaaaaaaaaaaaaaaaaaaaaaaaaaaaaaaaaaaaaaaaaaaaaaaaaaaaaaaaaaaaaaaaaaaaaaaaaaaaaaaaaaaaaaaaaaaaaaaaaaaaaaaaaaaaaaaaaaaaaaaaaaaaaaaaaaaaaaaaaaaaaaaaaaaaaaaaaaaaaaaaaaaaaaaaaaaaaaaaaaaaaaaaaaaaaaaaaaaaaaaaaaaaaaaaaaaaaaaaaaaaaaaaaaaaaaaaaaaaaaaaaaaaaaaaaaaaaaaaaaaaaaaaaaaaaaaaaaaaaaaaaaaaaaaaaaaaaaaaaaaaaaaaaaaaaaaaaaaaaaaaaaaaaaaaaaaaaaaaaaaaaaaaaaaaaaaaaaaaaaaaaaaaaaaaaaaaaaaaaaaaaaaaaaaaaaaaaaaaaaaaaaaaaaaaaaaaaaaaaaaaaaaaaaaaaaaaaaaaaaaaaaaaaaaaaaaaaaaaaaaaaaaaaaaaaaaaaaaaaaaaaaaaaaaaaaaaaaaaaaaaaaaaaaaaaaaaaaaaaaaaaaaaaaaaaaaaaaaaaaaaaaaaaaaaaaaaaaaaaaaaaaaaaaaaaaaaaaaaaaaaaaaaaaaaaaaaaaaaaaaaaaaaaaaaaaaaaaaaaaaaaaaaaaaaaaaaaaaaaaaaaaaaaaaaaaaaaaaaaaaaaaaaaaaaaaaaaaaaaaaaaaaaaaaaaaaaaaaaaaaaaaaaaaaaaaaaaaaaaaaaaaaaaaaaaaaaaaaaaaaaaaaaaaaaaaaaaaaaaaaaaaaaaaaaaaaaaaaaaaaaaaaaaaaaaaaaaaaaaaaaaaaaaaaaaaaaaaaaaaaaaaaaaaaaaaaaaaaaaaaaaaaaaaaaaaaaaaaaaaaaaaaaaaaaaaaaaaaaaaaaaaaaaaaaaaaaaaaaaaaaaaaaaaaaaaaaaaaaaaaaaaaaaaaaaaaaaaaaaaaaaaaaaaaaaaaaaaaaaaaaaaaaaaaaaaaaaaaaaaaaaaaaaaaaaaaaaaaaaaaaaaaaaaaaaaaaaaaaaaaaaaaaaaaaaaaaaaaaaaaaaaaaaaaaaaaaaaaaaaaaaaaaaaaaaaaaaaaaaaaaaaaaaaaaaaaaaaaaaaaaaaaaaaaaaaaaaaaaaaaaaaaaaaaaaaaaaaaaaaaaaaaaaaaaaaaaaaaaaaaaaaaaaaaaaaaaaaaaaaaaaaaaaaaaaaaaaaaaaaaaaaaaaaaaaaaaaaaaaaaaaaaaaaaaaaaaaaaaaaaaaaaaaaaaaaaaaaaaaaaaaaaaaaaaaaaaaaaaaaaaaaaaaaaaaaaaaaaaaaaaaaaaaaaaaaaaaaaaaaaaaaaaaaaaaaaaaaaaaaaaaaaaaaaaaaaaaaaaaaaaaaaaaaaaaaaaaaaaaaaaaaaaaaaaaaaaaaaaaaaaaaaaaaaaaaaaaaaaaaaaaaaaaaaaaaaaaaaaaaaaaaaaaaaaaaaaaaaaaaaaaaaaaaaaaaaaaaaaaaaaaaaaaaaaaaaaaaaaaaaaaaaaaaaaaaaaaaaaaaaaaaaaaaaaaaaaaaaaaaaaaaaaaaaaaaaaaaaaaaaaaaaaaaaaaaaaaaaaaaaaaaaaaaaaaaaaaaaaaaaaaaaaaaaaaaaaaaaaaaaaaaaaaaaaaaaaaaaaaaaaaaaaaaaaaaaaaaaaaaaaaaaaaaaaaaaaaaaaaaaaaaaaaaaaaaaaaaaaaaaaaaaaaaaaaaaaaaaaaaaaaaaaaaaaaaaaaaaaaaaaaaaaaaaaaaaaaaaaaaaaaaaaaaaaaaaaaaaaaaaaaaaaaaaaaaaaaaaaaaaaaaaaaaaaaaaaaaaaaaaaaaaaaaaaaaaaaaaaaaaaaaaaaaaaaaaaaaaaaaaaaaaaaaaaaaaaaaaaaaaaaaaaaaaaaaaaaaaaaaaaaaaaaaaaaaaaaaaaaaaaaaaaaaaaaaaaaaaaaaaaaaaaaaaaaaaaaaaaaaaaaaaaaaaaaaaaaaaaaaaaaaaaaaaaaaaaaaaaaaaaaaaaaaaaaaaaaaaaaaaaaaaaaaaaaaaaaaaaaaaaaaaaaaaaaaaaaaaaaaaaaaaaaaaaaaaaaaaaaaaaaaaaaaaaaaaaaaaaaaaaaaaaaaaaaaaaaaaaaaaaaaaaaaaaaaaaaaaaaaaaaaaaaaaaaaaaaaaaaaaaaaaaaaaaaaaaaaaaaaaaaaaaaaaaaaaaaaaaaaaaaaaaaaaaaaaaaaaaaaaaaaaaaaaaaaaaaaaaaaaaaaaaaaaaaaaaaaaaaaaaaaaaaaaaaaaaaaaaaaaaaaaaaaaaaaaaaaaaaaaaaaaaaaaaaaaaaaaaaaaaaaaaaaaaaaaaaaaaaaaaaaaaaaaaaaaaaaaaaaaaaaaaaaaaaaaaaaaaaaaaaaaaaaaaaaaaaaaaaaaaaaaaaaaaaaaaaaaaaaaaaaaaaaaaaaaaaaaaaaaaaaaaaaaaaaaaaaaaaaaaaaaaaaaaaaaaaaaaaaaaaaaaaaaaaaaaaaaaaaaaaaaaaaaaaaaaaaaaaaaaaaaaaaaaaaaaaaaaaaaaaaaaaaaaaaaaaaaaaaaaaaaaaaaaaaaaaaaaaaaaaaaaaaaaaaaaaaaaaaaaaaaaaaaaaaaaaaaaaaaaaaaaaaaaaaaaaaaaaaaaaaaaaaaaaaaaaaaaaaaaaaaaaaaaaaaaaaaaaaaaaaaaaaaaaaaaaaaaaaaaaaaaaaaaaaaaaaaaaaaaaaaaaaaaaaaaaaaaaaaaaaaaaaaaaaaaaaaaaaaaaaaaaaaaaaaaaaaaaaaaaaaaaaaaaaaaaaaaaaaaaaaaaaaaaaaaaaaaaaaaaaaaaaaaaaaaaaaaaaaaaaaaaaaaaaaaaaaaaaaaaaaaaaaaaaaaaaaaaaaaaaaaaaaaaaaaaaaaaaaaaaaaaaaaaaaaaaaaaaaaaaaaaaaaaaaaaaaaaaaaaaaaaaaaaaaaaaaaaaaaaaaaaaaaaaaaaaaaaaaaaaaaaaaaaaaaaaaaaaaaaaaaaaaaaaaaaaaaaaaaaaaaaaaaaaaaaaaaaaaaaaaaaaaaaaaaaaaaaaaaaaaaaaaaaaaaaaaaaaaaaaaaaaaaaaaaaaaaaaaaaaaaaaaaaaaaaaaaaaaaaaaaaaaaaaaaaaaaaaaaaaaaaaaaaaaaaaaaaaaaaaaaaaaaaaaaaaaaaaaaaaaaaaaaaaaaaaaaaaaaaaaaaaaaaaaaaaaaaaaaaaaaaaaaaaaaaaaaaaaaaaaaaaaaaaaaaaaaaaaaaaaaaaaaaaaaaaaaaaaaaaaaaaaaaaaaaaaaaaaaaaaaaaaaaaaaaaaaaaaaaaaaaaaaaaaaaaaaaaaaaaaaaaaaaaaaaaaaaaaaaaaaaaaaaaaaaaaaaaaaaaaaaaaaaaaaaaaaaaaaaaaaaaaaaaaaaaaaaaaaaaaaaaaaaaaaaaaaaaaaaaaaaaaaaaaaaaaaaaaaaaaaaaaaaaaaaaaaaaaaaaaaaaaaaaaaaaaaaaaaaaaaaaaaaaaaaaaaaaaaaaaaaaaaaaaaaaaaaaaaaaaaaaaaaaaaaaaaaaaaaaaaaaaaaaaaaaaaaaaaaaaaaaaaaaaaaaaaaaaaaaaaaaaaaaaaaaaaaaaaaaaaaaaaaaaaaaaaaaaaaaaaaaaaaaaaaaaaaaaaaaaaaaaaaaaaaaaaaaaaaaaaaaaaaaaaaaaaaaaaaaaaaaaaaaaaaaaaaaaaaaaaaaaaaaaaaaaaaaaaaaaaaaaaaaaaaaaaaaaaaaaaaaaaaaaaaaaaaaaaaaaaaaaaaaaaaaaaaaaaaaaaaaaaaaaaaaaaaaaaaaaaaaaaaaaaaaaaaaaaaaaaaaaaaaaaaaaaaaaaaaaaaaaaaaaaaaaaaaaaaaaaaaaaaaaaaaaaaaaaaaaaaaaaaaaaaaaaaaaaaaaaaaaaaaaaaaaaaaaaaaaaaaaaaaaaaaaaaaaaaaaaaaaaaaaaaaaaaaaaaaaaaaaaaaaaaaaaaaaaaaaaaaaaaaaaaaaaaaaaaaaaaaaaaaaaaaaaaaaaaaaaaaaaaaaaaaaaaaaaaaaaaaaaaaaaaaaaaaaaaaaaaaaaaaaaaaaaaaaaaaaaaaaaaaaaaaaaaaaaaaaaaaaaaaaaaaaaaaaaaaaaaaaaaaaaaaaaaaaaaaaaaaaaaaaaaaaaaaaaaaaaaaaaaaaaaaaaaaaaaaaaaaaaaaaaaaaaaaaaaaaaaaaaaaaaaaaaaaaaaaaaaaaaaaaaaaaaaaaaaaaaaaaaaaaaaaaaaaaaaaaaaaaaaaaaaaaaaaaaaaaaaaaaaaaaaaaaaaaaaaaaaaaaaaaaaaaaaaaaaaaaaaaaaaaaaaaaaaaaaaaaaaaaaaaaaaaaaaaaaaaaaaaaaaaaaaaaaaaaaaaaaaaaaaaaaaaaaaaaaaaaaaaaaaaaaaaaaaaaaaaaaaaaaaaaaaaaaaaaaaaaaaaaaaaaaaaaaaaaaaaaaaaaaaaaaaaaaaaaaaaaaaaaaaaaaaaaaaaaaaaaaaaaaaaaaaaaaaaaaaaaaaaaaaaaaaaaaaaaaaaaaaaaaaaaaaaaaaaaaaaaaaaaa

SEQ ID NO: 29 - DNA, 100 bp, synthetic construct
  misc_feature 1..100: note = source = /note="Description of Artificial Sequence: Synthetic polynucleotide"
  source 1..100: mol_type = other DNA
tttttttttttttttttttttttttttttttttttttttttttttttttttttttttttttttttttttttttttttttttttttttttttttttttttt

SEQ ID NO: 30 - DNA, 5000 bp, synthetic construct
  misc_feature 1..5000: note = /note="This sequence may encompass 50-5000 nucleotides"
  misc_feature 1..5000: note = source = /note="Description of Artificial Sequence: Synthetic polynucleotide"
  misc_feature 1..5000: note = source = /note="See specification as filed for detailed description of substitutions and preferred embodiments"
  source 1..5000: mol_type = other DNA
tttttttttttttttttttttttttttttttttttttttttttttttttttttttttttttttttttttttttttttttttttttttttttttttttttttttttttttttttttttttttttttttttttttttttttttttttttttttttttttttttttttttttttttttttttttttttttttttttttttttttttttttttttttttttttttttttttttttttttttttttttttttttttttttttttttttttttttttttttttttttttttttttttttttttttttttttttttttttttttttttttttttttttttttttttttttttttttttttttttttttttttttttttttttttttttttttttttttttttttttttttttttttttttttttttttttttttttttttttttttttttttttttttttttttttttttttttttttttttttttttttttttttttttttttttttttttttttttttttttttttttttttttttttttttttttttttttttttttttttttttttttttttttttttttttttttttttttttttttttttttttttttttttttttttttttttttttttttttttttttttttttttttttttttttttttttttttttttttttttttttttttttttttttttttttttttttttttttttttttttttttttttttttttttttttttttttttttttttttttttttttttttttttttttttttttttttttttttttttttttttttttttttttttttttttttttttttttttttttttttttttttttttttttttttttttttttttttttttttttttttttttttttttttttttttttttttttttttttttttttttttttttttttttttttttttttttttttttttttttttttttttttttttttttttttttttttttttttttttttttttttttttttttttttttttttttttttttttttttttttttttttttttttttttttttttttttttttttttttttttttttttttttttttttttttttttttttttttttttttttttttttttttttttttttttttttttttttttttttttttttttttttttttttttttttttttttttttttttttttttttttttttttttttttttttttttttttttttttttttttttttttttttttttttttttttttttttttttttttttttttttttttttttttttttttttttttttttttttttttttttttttttttttttttttttttttttttttttttttttttttttttttttttttttttttttttttttttttttttttttttttttttttttttttttttttttttttttttttttttttttttttttttttttttttttttttttttttttttttttttttttttttttttttttttttttttttttttttttttttttttttttttttttttttttttttttttttttttttttttttttttttttttttttttttttttttttttttttttttttttttttttttttttttttttttttttttttttttttttttttttttttttttttttttttttttttttttttttttttttttttttttttttttttttttttttttttttttttttttttttttttttttttttttttttttttttttttttttttttttttttttttttttttttttttttttttttttttttttttttttttttttttttttttttttttttttttttttttttttttttttttttttttttttttttttttttttttttttttttttttttttttttttttttttttttttttttttttttttttttttttttttttttttttttttttttttttttttttttttttttttttttttttttttttttttttttttttttttttttttttttttttttttttttttttttttttttttttttttttttttttttttttttttttttttttttttttttttttttttttttttttttttttttttttttttttttttttttttttttttttttttttttttttttttttttttttttttttttttttttttttttttttttttttttttttttttttttttttttttttttttttttttttttttttttttttttttttttttttttttttttttttttttttttttttttttttttttttttttttttttttttttttttttttttttttttttttttttttttttttttttttttttttttttttttttttttttttttttttttttttttttttttttttttttttttttttttttttttttttttttttttttttttttttttttttttttttttttttttttttttttttttttttttttttttttttttttttttttttttttttttttttttttttttttttttttttttttttttttttttttttttttttttttttttttttttttttttttttttttttttttttttttttttttttttttttttttttttttttttttttttttttttttttttttttttttttttttttttttttttttttttttttttttttttttttttttttttttttttttttttttttttttttttttttttttttttttttttttttttttttttttttttttttttttttttttttttttttttttttttttttttttttttttttttttttttttttttttttttttttttttttttttttttttttttttttttttttttttttttttttttttttttttttttttttttttttttttttttttttttttttttttttttttttttttttttttttttttttttttttttttttttttttttttttttttttttttttttttttttttttttttttttttttttttttttttttttttttttttttttttttttttttttttttttttttttttttttttttttttttttttttttttttttttttttttttttttttttttttttttttttttttttttttttttttttttttttttttttttttttttttttttttttttttttttttttttttttttttttttttttttttttttttttttttttttttttttttttttttttttttttttttttttttttttttttttttttttttttttttttttttttttttttttttttttttttttttttttttttttttttttttttttttttttttttttttttttttttttttttttttttttttttttttttttttttttttttttttttttttttttttttttttttttttttttttttttttttttttttttttttttttttttttttttttttttttttttttttttttttttttttttttttttttttttttttttttttttttttttttttttttttttttttttttttttttttttttttttttttttttttttttttttttttttttttttttttttttttttttttttttttttttttttttttttttttttttttttttttttttttttttttttttttttttttttttttttttttttttttttttttttttttttttttttttttttttttttttttttttttttttttttttttttttttttttttttttttttttttttttttttttttttttttttttttttttttttttttttttttttttttttttttttttttttttttttttttttttttttttttttttttttttttttttttttttttttttttttttttttttttttttttttttttttttttttttttttttttttttttttttttttttttttttttttttttttttttttttttttttttttttttttttttttttttttttttttttttttttttttttttttttttttttttttttttttttttttttttttttttttttttttttttttttttttttttttttttttttttttttttttttttttttttttttttttttttttttttttttttttttttttttttttttttttttttttttttttttttttttttttttttttttttttttttttttttttttttttttttttttttttttttttttttttttttttttttttttttttttttttttttttttttttttttttttttttttttttttttttttttttttttttttttttttttttttttttttttttttttttttttttttttttttttttttttttttttttttttttttttttttttttttttttttttttttttttttttttttttttttttttttttttttttttttttttttttttttttttttttttttttttttttttttttttttttttttttttttttttttttttttttttttttttttttttttttttttttttttttttttttttttttttttttttttttttttttttttttttttttttttttttttttttttttttttttttttttttttttttttttttttttttttttttttttttttttttttttttttttttttttttttttttttttttttttttttttttttttttttttttttttttttttttttttttttttttttttttttttttttttttttttttttttttttttttttttttttttttttttttttttttttttttttttttttttttttttttttttttttttttttttttttttttttttttttttttttttttttttttttttttttttttttttttttttttttttttttttttttttttttttttttttttttttttttttttttttttttttttttttttttttttttttttttttttttttttttttttttttttttttttttttttttttttttttttttttttttttttttttttttttttttttttttttttttttttttttttttttttttttttttttttttt

SEQ ID NO: 31 - protein, 486 aa, synthetic construct
  REGION 1..486: note = source = /note="Description of Artificial Sequence: Synthetic polypeptide"
MALPVTALLLPLALLLHAARPEIVMTQSPATLSLSPGERATLSCRASQDISKYLNWYQQKPGQAPRLLIYHTSRLHSGIPARFSGSGSGTDYTLTISSLQPEDFAVYFCQQGNTLPYTFGQGTKLEIKGGGGSGGGGSGGGGSQVQLQESGPGLVKPSETLSLTCTVSGVSLPDYGVSWIRQPPGKGLEWIGVIWGSETTYYSSSLKSRVTISKDNSKNQVSLKLSSVTAADTAVYYCAKHYYYGGSYAMDYWGQGTLVTVSSTTTPAPRPPTPAPTIASQPLSLRPEACRPAAGGAVHTRGLDFACDIYIWAPLAGTCGVLLLSLVITLYCKRGRKKLLYIFKQPFMRPVQTTQEEDGCSCRFPEEEEGGCELRVKFSRSADAPAYKQGQNQLYNELNLGRREEYDVLDKRRGRDPEMGGKPRRKNPQEGLYNELQKDKMAEAYSEIGMKGERRRGKGHDGLYQGLSTATKDTYDALHMQALPPR

SEQ ID NO: 32 - protein, 486 aa, synthetic construct
  REGION 1..486: note = source = /note="Description of Artificial Sequence: Synthetic polypeptide"
MALPVTALLLPLALLLHAARPEIVMTQSPATLSLSPGERATLSCRASQDISKYLNWYQQKPGQAPRLLIYHTSRLHSGIPARFSGSGSGTDYTLTISSLQPEDFAVYFCQQGNTLPYTFGQGTKLEIKGGGGSGGGGSGGGGSQVQLQESGPGLVKPSETLSLTCTVSGVSLPDYGVSWIRQPPGKGLEWIGVIWGSETTYYQSSLKSRVTISKDNSKNQVSLKLSSVTAADTAVYYCAKHYYYGGSYAMDYWGQGTLVTVSSTTTPAPRPPTPAPTIASQPLSLRPEACRPAAGGAVHTRGLDFACDIYIWAPLAGTCGVLLLSLVITLYCKRGRKKLLYIFKQPFMRPVQTTQEEDGCSCRFPEEEEGGCELRVKFSRSADAPAYKQGQNQLYNELNLGRREEYDVLDKRRGRDPEMGGKPRRKNPQEGLYNELQKDKMAEAYSEIGMKGERRRGKGHDGLYQGLSTATKDTYDALHMQALPPR

SEQ ID NO: 33 - protein, 486 aa, synthetic construct
  REGION 1..486: note = source = /note="Description of Artificial Sequence: Synthetic polypeptide"
MALPVTALLLPLALLLHAARPQVQLQESGPGLVKPSETLSLTCTVSGVSLPDYGVSWIRQPPGKGLEWIGVIWGSETTYYSSSLKSRVTISKDNSKNQVSLKLSSVTAADTAVYYCAKHYYYGGSYAMDYWGQGTLVTVSSGGGGSGGGGSGGGGSEIVMTQSPATLSLSPGERATLSCRASQDISKYLNWYQQKPGQAPRLLIYHTSRLHSGIPARFSGSGSGTDYTLTISSLQPEDFAVYFCQQGNTLPYTFGQGTKLEIKTTTPAPRPPTPAPTIASQPLSLRPEACRPAAGGAVHTRGLDFACDIYIWAPLAGTCGVLLLSLVITLYCKRGRKKLLYIFKQPFMRPVQTTQEEDGCSCRFPEEEEGGCELRVKFSRSADAPAYKQGQNQLYNELNLGRREEYDVLDKRRGRDPEMGGKPRRKNPQEGLYNELQKDKMAEAYSEIGMKGERRRGKGHDGLYQGLSTATKDTYDALHMQALPPR

SEQ ID NO: 34 - protein, 486 aa, synthetic construct
  REGION 1..486: note = source = /note="Description of Artificial Sequence: Synthetic polypeptide"
MALPVTALLLPLALLLHAARPQVQLQESGPGLVKPSETLSLTCTVSGVSLPDYGVSWIRQPPGKGLEWIGVIWGSETTYYQSSLKSRVTISKDNSKNQVSLKLSSVTAADTAVYYCAKHYYYGGSYAMDYWGQGTLVTVSSGGGGSGGGGSGGGGSEIVMTQSPATLSLSPGERATLSCRASQDISKYLNWYQQKPGQAPRLLIYHTSRLHSGIPARFSGSGSGTDYTLTISSLQPEDFAVYFCQQGNTLPYTFGQGTKLEIKTTTPAPRPPTPAPTIASQPLSLRPEACRPAAGGAVHTRGLDFACDIYIWAPLAGTCGVLLLSLVITLYCKRGRKKLLYIFKQPFMRPVQTTQEEDGCSCRFPEEEEGGCELRVKFSRSADAPAYKQGQNQLYNELNLGRREEYDVLDKRRGRDPEMGGKPRRKNPQEGLYNELQKDKMAEAYSEIGMKGERRRGKGHDGLYQGLSTATKDTYDALHMQALPPR

SEQ ID NO: 35 - protein, 491 aa, synthetic construct
  REGION 1..491: note = source = /note="Description of Artificial Sequence: Synthetic polypeptide"
MALPVTALLLPLALLLHAARPEIVMTQSPATLSLSPGERATLSCRASQDISKYLNWYQQKPGQAPRLLIYHTSRLHSGIPARFSGSGSGTDYTLTISSLQPEDFAVYFCQQGNTLPYTFGQGTKLEIKGGGGSGGGGSGGGGSGGGGSQVQLQESGPGLVKPSETLSLTCTVSGVSLPDYGVSWIRQPPGKGLEWIGVIWGSETTYYSSSLKSRVTISKDNSKNQVSLKLSSVTAADTAVYYCAKHYYYGGSYAMDYWGQGTLVTVSSTTTPAPRPPTPAPTIASQPLSLRPEACRPAAGGAVHTRGLDFACDIYIWAPLAGTCGVLLLSLVITLYCKRGRKKLLYIFKQPFMRPVQTTQEEDGCSCRFPEEEEGGCELRVKFSRSADAPAYKQGQNQLYNELNLGRREEYDVLDKRRGRDPEMGGKPRRKNPQEGLYNELQKDKMAEAYSEIGMKGERRRGKGHDGLYQGLSTATKDTYDALHMQALPPR

SEQ ID NO: 36 - protein, 491 aa, synthetic construct
  REGION 1..491: note = source = /note="Description of Artificial Sequence: Synthetic polypeptide"
MALPVTALLLPLALLLHAARPEIVMTQSPATLSLSPGERATLSCRASQDISKYLNWYQQKPGQAPRLLIYHTSRLHSGIPARFSGSGSGTDYTLTISSLQPEDFAVYFCQQGNTLPYTFGQGTKLEIKGGGGSGGGGSGGGGSGGGGSQVQLQESGPGLVKPSETLSLTCTVSGVSLPDYGVSWIRQPPGKGLEWIGVIWGSETTYYQSSLKSRVTISKDNSKNQVSLKLSSVTAADTAVYYCAKHYYYGGSYAMDYWGQGTLVTVSSTTTPAPRPPTPAPTIASQPLSLRPEACRPAAGGAVHTRGLDFACDIYIWAPLAGTCGVLLLSLVITLYCKRGRKKLLYIFKQPFMRPVQTTQEEDGCSCRFPEEEEGGCELRVKFSRSADAPAYKQGQNQLYNELNLGRREEYDVLDKRRGRDPEMGGKPRRKNPQEGLYNELQKDKMAEAYSEIGMKGERRRGKGHDGLYQGLSTATKDTYDALHMQALPPR

SEQ ID NO: 37 - protein, 491 aa, synthetic construct
  REGION 1..491: note = source = /note="Description of Artificial Sequence: Synthetic polypeptide"
MALPVTALLLPLALLLHAARPQVQLQESGPGLVKPSETLSLTCTVSGVSLPDYGVSWIRQPPGKGLEWIGVIWGSETTYYSSSLKSRVTISKDNSKNQVSLKLSSVTAADTAVYYCAKHYYYGGSYAMDYWGQGTLVTVSSGGGGSGGGGSGGGGSGGGGSEIVMTQSPATLSLSPGERATLSCRASQDISKYLNWYQQKPGQAPRLLIYHTSRLHSGIPARFSGSGSGTDYTLTISSLQPEDFAVYFCQQGNTLPYTFGQGTKLEIKTTTPAPRPPTPAPTIASQPLSLRPEACRPAAGGAVHTRGLDFACDIYIWAPLAGTCGVLLLSLVITLYCKRGRKKLLYIFKQPFMRPVQTTQEEDGCSCRFPEEEEGGCELRVKFSRSADAPAYKQGQNQLYNELNLGRREEYDVLDKRRGRDPEMGGKPRRKNPQEGLYNELQKDKMAEAYSEIGMKGERRRGKGHDGLYQGLSTATKDTYDALHMQALPPR

SEQ ID NO: 38 - protein, 491 aa, synthetic construct
  REGION 1..491: note = source = /note="Description of Artificial Sequence: Synthetic polypeptide"
MALPVTALLLPLALLLHAARPQVQLQESGPGLVKPSETLSLTCTVSGVSLPDYGVSWIRQPPGKGLEWIGVIWGSETTYYQSSLKSRVTISKDNSKNQVSLKLSSVTAADTAVYYCAKHYYYGGSYAMDYWGQGTLVTVSSGGGGSGGGGSGGGGSGGGGSEIVMTQSPATLSLSPGERATLSCRASQDISKYLNWYQQKPGQAPRLLIYHTSRLHSGIPARFSGSGSGTDYTLTISSLQPEDFAVYFCQQGNTLPYTFGQGTKLEIKTTTPAPRPPTPAPTIASQPLSLRPEACRPAAGGAVHTRGLDFACDIYIWAPLAGTCGVLLLSLVITLYCKRGRKKLLYIFKQPFMRPVQTTQEEDGCSCRFPEEEEGGCELRVKFSRSADAPAYKQGQNQLYNELNLGRREEYDVLDKRRGRDPEMGGKPRRKNPQEGLYNELQKDKMAEAYSEIGMKGERRRGKGHDGLYQGLSTATKDTYDALHMQALPPR

SEQ ID NO: 39 - protein, 491 aa, synthetic construct
  REGION 1..491: note = source = /note="Description of Artificial Sequence: Synthetic polypeptide"
MALPVTALLLPLALLLHAARPEIVMTQSPATLSLSPGERATLSCRASQDISKYLNWYQQKPGQAPRLLIYHTSRLHSGIPARFSGSGSGTDYTLTISSLQPEDFAVYFCQQGNTLPYTFGQGTKLEIKGGGGSGGGGSGGGGSGGGGSQVQLQESGPGLVKPSETLSLTCTVSGVSLPDYGVSWIRQPPGKGLEWIGVIWGSETTYYNSSLKSRVTISKDNSKNQVSLKLSSVTAADTAVYYCAKHYYYGGSYAMDYWGQGTLVTVSSTTTPAPRPPTPAPTIASQPLSLRPEACRPAAGGAVHTRGLDFACDIYIWAPLAGTCGVLLLSLVITLYCKRGRKKLLYIFKQPFMRPVQTTQEEDGCSCRFPEEEEGGCELRVKFSRSADAPAYKQGQNQLYNELNLGRREEYDVLDKRRGRDPEMGGKPRRKNPQEGLYNELQKDKMAEAYSEIGMKGERRRGKGHDGLYQGLSTATKDTYDALHMQALPPR

SEQ ID NO: 40 - protein, 491 aa, synthetic construct; identical to SEQ ID NO: 39
  REGION 1..491: note = source = /note="Description of Artificial Sequence: Synthetic polypeptide"

SEQ ID NO: 41 - protein, 491 aa, synthetic construct
  REGION 1..491: note = source = /note="Description of Artificial Sequence: Synthetic polypeptide"
MALPVTALLLPLALLLHAARPQVQLQESGPGLVKPSETLSLTCTVSGVSLPDYGVSWIRQPPGKGLEWIGVIWGSETTYYNSSLKSRVTISKDNSKNQVSLKLSSVTAADTAVYYCAKHYYYGGSYAMDYWGQGTLVTVSSGGGGSGGGGSGGGGSGGGGSEIVMTQSPATLSLSPGERATLSCRASQDISKYLNWYQQKPGQAPRLLIYHTSRLHSGIPARFSGSGSGTDYTLTISSLQPEDFAVYFCQQGNTLPYTFGQGTKLEIKTTTPAPRPPTPAPTIASQPLSLRPEACRPAAGGAVHTRGLDFACDIYIWAPLAGTCGVLLLSLVITLYCKRGRKKLLYIFKQPFMRPVQTTQEEDGCSCRFPEEEEGGCELRVKFSRSADAPAYKQGQNQLYNELNLGRREEYDVLDKRRGRDPEMGGKPRRKNPQEGLYNELQKDKMAEAYSEIGMKGERRRGKGHDGLYQGLSTATKDTYDALHMQALPPR

SEQ ID NO: 42 - protein, 486 aa, synthetic construct
  REGION 1..486: note = source = /note="Description of Artificial Sequence: Synthetic polypeptide"
MALPVTALLLPLALLLHAARPEIVMTQSPATLSLSPGERATLSCRASQDISKYLNWYQQKPGQAPRLLIYHTSRLHSGIPARFSGSGSGTDYTLTISSLQPEDFAVYFCQQGNTLPYTFGQGTKLEIKGGGGSGGGGSGGGGSQVQLQESGPGLVKPSETLSLTCTVSGVSLPDYGVSWIRQPPGKGLEWIGVIWGSETTYYNSSLKSRVTISKDNSKNQVSLKLSSVTAADTAVYYCAKHYYYGGSYAMDYWGQGTLVTVSSTTTPAPRPPTPAPTIASQPLSLRPEACRPAAGGAVHTRGLDFACDIYIWAPLAGTCGVLLLSLVITLYCKRGRKKLLYIFKQPFMRPVQTTQEEDGCSCRFPEEEEGGCELRVKFSRSADAPAYKQGQNQLYNELNLGRREEYDVLDKRRGRDPEMGGKPRRKNPQEGLYNELQKDKMAEAYSEIGMKGERRRGKGHDGLYQGLSTATKDTYDALHMQALPPR

SEQ ID NO: 43 - protein, 112 aa, synthetic construct
  REGION 1..112: note = source = /note="Description of Artificial Sequence: Synthetic polypeptide"
RVKFSRSADAPAYQQGQNQLYNELNLGRREEYDVLDKRRGRDPEMGGKPRRKNPQEGLYNELQKDKMAEAYSEIGMKGERRRGKGHDGLYQGLSTATKDTYDALHMQALPPR

SEQ ID NO: 44 - DNA, 336 bp, synthetic construct
  misc_feature 1..336: note = source = /note="Description of Artificial Sequence: Synthetic polynucleotide"
  source 1..336: mol_type = other DNA
agagtgaagttcagcaggagcgcagacgcccccgcgtaccagcagggccagaaccagctctataacgagctcaatctaggacgaagagaggagtacgatgttttggacaagagacgtggccgggaccctgagatggggggaaagccgagaaggaagaaccctcaggaaggcctgtacaatgaactgcagaaagataagatggcggaggcctacagtgagattgggatgaaaggcgagcgccggaggggcaaggggcacgatggcctttaccagggtctcagtacagccaccaaggacacctacgacgcccttcacatgcaggccctgccccctcgc

SEQ ID NO: 45 - protein, 230 aa, synthetic construct
  REGION 1..230: note = source = /note="Description of Artificial Sequence: Synthetic polypeptide"
ESKYGPPCPPCPAPEFLGGPSVFLFPPKPKDTLMISRTPEVTCVVVDVSQEDPEVQFNWYVDGVEVHNAKTKPREEQFNSTYRVVSVLTVLHQDWLNGKEYKCKVSNKGLPSSIEKTISKAKGQPREPQVYTLPPSQEEMTKNQVSLTCLVKGFYPSDIAVEWESNGQPENNYKTTPPVLDSDGSFFLYSRLTVDKSRWQEGNVFSCSVMHEALHNHYTQKSLSLSLGKM

SEQ ID NO: 46 - DNA, 690 bp, synthetic construct
  misc_feature 1..690: note = source = /note="Description of Artificial Sequence: Synthetic polynucleotide"
  source 1..690: mol_type = other DNA
gagagcaagtacggccctccctgccccccttgccctgcccccgagttcctgggcggacccagcgtgttcctgttcccccccaagcccaaggacaccctgatgatcagccggacccccgaggtgacctgtgtggtggtggacgtgtcccaggaggaccccgaggtccagttcaactggtacgtggacggcgtggaggtgcacaacgccaagaccaagccccgggaggagcagttcaatagcacctaccgggtggtgtccgtgctgaccgtgctgcaccaggactggctgaacggcaaggaatacaagtgtaaggtgtccaacaagggcctgcccagcagcatcgagaaaaccatcagcaaggccaagggccagcctcgggagccccaggtgtacaccctgccccctagccaagaggagatgaccaagaaccaggtgtccctgacctgcctggtgaagggcttctaccccagcgacatcgccgtggagtgggagagcaacggccagcccgagaacaactacaagaccaccccccctgtgctggacagcgacggcagcttcttcctgtacagccggctgaccgtggacaagagccggtggcaggagggcaacgtctttagctgctccgtgatgcacgaggccctgcacaaccactacacccagaagagcctgagcctgtccctgggcaagatg

SEQ ID NO: 47 - protein, 282 aa, synthetic construct
  REGION 1..282: note = source = /note="Description of Artificial Sequence: Synthetic polypeptide"
RWPESPKAQASSVPTAQPQAEGSLAKATTAPATTRNTGRGGEEKKKEKEKEEQEERETKTPECPSHTQPLGVYLLTPAVQDLWLRDKATFTCFVVGSDLKDAHLTWEVAGKVPTGGVEEGLLERHSNGSQSQHSRLTLPRSLWNAGTSVTCTLNHPSLPPQRLMALREPAAQAPVKLSLNLLASSDPPEAASWLLCEVSGFSPPNILLMWLEDQREVNTSGFAPARPPPQPGSTTFWAWSVLRVPAPPSPQPATYTCVVSHEDSRTLLNASRSLEVSYVTDH

SEQ ID NO: 48 - DNA, 847 bp, synthetic construct
  misc_feature 1..847: note = source = /note="Description of Artificial Sequence: Synthetic polynucleotide"
  source 1..847: mol_type = other DNA
aggtggcccgaaagtcccaaggcccaggcatctagtgttcctactgcacagccccaggcagaaggcagcctagccaaagctactactgcacctgccactacgcgcaatactggccgtggcggggaggagaagaaaaaggagaaagagaaagaagaacaggaagagagggagaccaagacccctgaatgtccatcccatacccagccgctgggcgtctatctcttgactcccgcagtacaggacttgtggcttagagataaggccacctttacatgtttcgtcgtgggctctgacctgaaggatgcccatttgacttgggaggttgccggaaaggtacccacagggggggttgaggaagggttgctggagcgccattccaatggctctcagagccagcactcaagactcacccttccgagatccctgtggaacgccgggacctctgtcacatgtactctaaatcatcctagcctgcccccacagcgtctgatggcccttagagagccagccgcccaggcaccagttaagcttagcctgaatctgctcgccagtagtgatcccccagaggccgccagctggctcttatgcgaagtgtccggctttagcccgcccaacatcttgctcatgtggctggaggaccagcgagaagtgaacaccagcggcttcgctccagcccggcccccaccccagccgggttctaccacattctgggcctggagtgtcttaagggtcccagcaccacctagcccccagccagccacatacacctgtgttgtgtcccatgaagatagcaggaccctgctaaatgcttctaggagtctggaggtttcctacgtgactgaccatt

SEQ ID NO: 49 - protein, 10 aa, synthetic construct
  REGION 1..10: note = source = /note="Description of Artificial Sequence: Synthetic peptide"
GGGGSGGGGS

SEQ ID NO: 50 - DNA, 30 bp, synthetic construct
  misc_feature 1..30: note = source = /note="Description of Artificial Sequence: Synthetic oligonucleotide"
  source 1..30: mol_type = other DNA
ggtggcggaggttctggaggtggaggttcc

SEQ ID NO: 51 - protein, 48 aa, synthetic construct
  REGION 1..48: note = source = /note="Description of Artificial Sequence: Synthetic polypeptide"
QRRKYRSNKGESPVEPAEPCRYSCPREEEGSTIPIQEDYRKPEPACSP

SEQ ID NO: 52 - DNA, 123 bp, synthetic construct
  misc_feature 1..123: note = source = /note="Description of Artificial Sequence: Synthetic polynucleotide"
  source 1..123: mol_type = other DNA
aggagtaagaggagcaggctcctgcacagtgactacatgaacatgactccccgccgccccgggcccacccgcaagcattaccagccctatgccccaccacgcgacttcgcagcctatcgctcc

SEQ ID NO: 53 - protein, 30 aa, synthetic construct
  REGION 1..30: note = MISC_FEATURE - /note="This sequence may encompass 1-6 'Gly-Gly-Gly-Gly-Ser' repeating units"
  REGION 1..30: note = source = /note="Description of Artificial Sequence: Synthetic polypeptide"
  REGION 1..30: note = source = /note="See specification as filed for detailed description of substitutions and preferred embodiments"
GGGGSGGGGSGGGGSGGGGSGGGGSGGGGS

SEQ ID NO: 54 - DNA, 63 bp, synthetic construct
  misc_feature 1..63: note = source = /note="Description of Artificial Sequence: Synthetic oligonucleotide"
  source 1..63: mol_type = other DNA
atggccctgcctgtgacagccctgctgctgcctctggctctgctgctgcatgccgctagaccc

SEQ ID NO: 55 - DNA, 135 bp, synthetic construct
  misc_feature 1..135: note = source = /note="Description of Artificial Sequence: Synthetic polynucleotide"
  source 1..135: mol_type = other DNA
accacgacgccagcgccgcgaccaccaacaccggcgcccaccatcgcgtcgcagcccctgtccctgcgcccagaggcgtgccggccagcggcggggggcgcagtgcacacgagggggctggacttcgcctgtgat

SEQ ID NO: 56 - DNA, 72 bp, synthetic construct
  misc_feature 1..72: note = source = /note="Description of Artificial Sequence: Synthetic oligonucleotide"
  source 1..72: mol_type = other DNA
atctacatctgggcgcccttggccgggacttgtggggtccttctcctgtcactggttatcaccctttactgc

SEQ ID NO: 57 - DNA, 5000 bp, synthetic construct; identical to SEQ ID NO: 28
  misc_feature 1..5000: note = /note="This sequence may encompass 100-5000 nucleotides"
  misc_feature 1..5000: note = source = /note="Description of Artificial Sequence: Synthetic polynucleotide"
  misc_feature 1..5000: note = source = /note="See specification as filed for detailed description of substitutions and preferred embodiments"
  source 1..5000: mol_type = other DNA

SEQ ID NO: 58 - protein, 486 aa, synthetic construct
  REGION 1..486: note = source = /note="Description of Artificial Sequence: Synthetic polypeptide"
MALPVTALLLPLALLLHAARPDIQMTQTTSSLSASLGDRVTISCRASQDISKYLNWYQQKPDGTVKLLIYHTSRLHSGVPSRFSGSGSGTDYSLTISNLEQEDIATYFCQQGNTLPYTFGGGTKLEITGGGGSGGGGSGGGGSEVKLQESGPGLVAPSQSLSVTCTVSGVSLPDYGVSWIRQPPRKGLEWLGVIWGSETTYYNSALKSRLTIIKDNSKSQVFLKMNSLQTDDTAIYYCAKHYYYGGSYAMDYWGQGTSVTVSSTTTPAPRPPTPAPTIASQPLSLRPEACRPAAGGAVHTRGLDFACDIYIWAPLAGTCGVLLLSLVITLYCKRGRKKLLYIFKQPFMRPVQTTQEEDGCSCRFPEEEEGGCELRVKFSRSADAPAYKQGQNQLYNELNLGRREEYDVLDKRRGRDPEMGGKPRRKNPQEGLYNELQKDKMAEAYSEIGMKGERRRGKGHDGLYQGLSTATKDTYDALHMQALPPR

SEQ ID NO: 59 - protein, 242 aa, synthetic construct
  REGION 1..242: note = source = /note="Description of Artificial Sequence: Synthetic polypeptide"
DIQMTQTTSSLSASLGDRVTISCRASQDISKYLNWYQQKPDGTVKLLIYHTSRLHSGVPSRFSGSGSGTDYSLTISNLEQEDIATYFCQQGNTLPYTFGGGTKLEITGGGGSGGGGSGGGGSEVKLQESGPGLVAPSQSLSVTCTVSGVSLPDYGVSWIRQPPRKGLEWLGVIWGSETTYYNSALKSRLTIIKDNSKSQVFLKMNSLQTDDTAIYYCAKHYYYGGSYAMDYWGQGTSVTVSS

SEQ ID NO: 60 - DNA, 126 bp, synthetic construct
  misc_feature 1..126: note = source = /note="Description of Artificial Sequence: Synthetic polynucleotide"
  source 1..126: mol_type = other DNA
aaacggggcagaaagaaactcctgtatatattcaaacaaccatttatgagaccagtacaaactactcaagaggaagatggctgtagctgccgatttccagaagaagaagaaggaggatgtgaactg

SEQ ID NO: 61 - DNA, 813 bp, synthetic construct
  misc_feature 1..813: note = source = /note="Description of Artificial Sequence: Synthetic polynucleotide"
  source 1..813: mol_type = other DNA
atggccctccctgtcaccgccctgctgcttccgctggctcttctgctccacgccgctcggcccgaaattgtgatgacccagtcacccgccactcttagcctttcacccggtgagcgcgcaaccctgtcttgcagagcctcccaagacatctcaaaataccttaattggtatcaacagaagcccggacaggctcctcgccttctgatctaccacaccagccggctccattctggaatccctgccaggttcagcggtagcggatctgggaccgactacaccctcactatcagctcactgcagccagaggacttcgctgtctatttctgtcagcaagggaacaccctgccctacacctttggacagggcaccaagctcgagattaaaggtggaggtggcagcggaggaggtgggtccggcggtggaggaagccaggtccaactccaagaaagcggaccgggtcttgtgaagccatcagaaactctttcactgacttgtactgtgagcggagtgtctctccccgattacggggtgtcttggatcagacagccaccggggaagggtctggaatggattggagtgatttggggctctgagactacttactactcttcatccctcaagtcacgcgtcaccatctcaaaggacaactctaagaatcaggtgtcactgaaactgtcatctgtgaccgcagccgacaccgccgtgtactattgcgctaagcattactattatggcgggagctacgcaatggattactggggacagggtactctggtcaccgtgtccagccaccaccatcatcaccatcaccat

SEQ ID NO: 62 - DNA, 813 bp, synthetic construct
  misc_feature 1..813: note = source = /note="Description of Artificial Sequence: Synthetic polynucleotide"
  source 1..813: mol_type = other DNA
atggccctccctgtcaccgccctgctgcttccgctggctcttctgctccacgccgctcggcccgaaattgtgatgacccagtcacccgccactcttagcctttcacccggtgagcgcgcaaccctgtcttgcagagcctcccaagacatctcaaaataccttaattggtatcaacagaagcccggacaggctcctcgccttctgatctaccacaccagccggctccattctggaatccctgccaggttcagcggtagcggatctgggaccgactacaccctcactatcagctcactgcagccagaggacttcgctgtctatttctgtcagcaagggaacaccctgccctacacctttggacagggcaccaagctcgagattaaaggtggaggtggcagcggaggaggtgggtccggcggtggaggaagccaggtccaactccaagaaagcggaccgggtcttgtgaagccatcagaaactctttcactgacttgtactgtgagcggagtgtctctccccgattacggggtgtcttggatcagacagccaccggggaagggtctggaatggattggagtgatttggggctctgagactacttactaccaatcatccctcaagtcacgcgtcaccatctcaaaggacaactctaagaatcaggtgtcactgaaactgtcatctgtgaccgcagccgacaccgccgtgtactattgcgctaagcattactattatggcgggagctacgcaatggattactggggacagggtactctggtcaccgtgtccagccaccaccatcatcaccatcaccat

SEQ ID NO: 63 - DNA, 813 bp, synthetic construct
  misc_feature 1..813: note = source = /note="Description of Artificial Sequence: Synthetic polynucleotide"
  source 1..813: mol_type = other DNA
atggctctgcccgtgaccgcactcctcctgccactggctctgctgcttcacgccgctcgcccacaagtccagcttcaagaatcagggcctggtctggtgaagccatctgagactctgtccctcacttgcaccgtgagcggagtgtccctcccagactacggagtgagctggattagacagcctcccggaaagggactggagtggatcggagtgatttggggtagcgaaaccacttactattcatcttccctgaagtcacgggtcaccatttcaaaggataactcaaagaatcaagtgagcctcaagctctcatcagtcaccgccgctgacaccgccgtgtattactgtgccaagcattactactatggagggtcctacgccatggactactggggccagggaactctggtcactgtgtcatctggtggaggaggtagcggaggaggcgggagcggtggaggtggctccgaaatcgtgatgacccagagccctgcaaccctgtccctttctcccggggaacgggctaccctttcttgtcgggcatcacaagatatctcaaaatacctcaattggtatcaacagaagccgggacaggcccctaggcttcttatctaccacacctctcgcctgcatagcgggattcccgcacgctttagcgggtctggaagcgggaccgactacactctgaccatctcatctctccagcccgaggacttcgccgtctacttctgccagcagggtaacaccctgccgtacaccttcggccagggcaccaagcttgagatcaaacatcaccaccatcatcaccatcac

SEQ ID NO: 64 - DNA, 813 bp, synthetic construct
  misc_feature 1..813: note = source = /note="Description of Artificial Sequence: Synthetic polynucleotide"
  source 1..813: mol_type = other DNA
atggctctgcccgtgaccgcactcctcctgccactggctctgctgcttcacgccgctcgcccacaagtccagcttcaagaatcagggcctggtctggtgaagccatctgagactctgtccctcacttgcaccgtgagcggagtgtccctcccagactacggagtgagctggattagacagcctcccggaaagggactggagtggatcggagtgatttggggtagcgaaaccacttactatcaatcttccctgaagtcacgggtcaccatttcaaaggataactcaaagaatcaagtgagcctcaagctctcatcagtcaccgccgctgacaccgccgtgtattactgtgccaagcattactactatggagggtcctacgccatggactactggggccagggaactctggtcactgtgtcatctggtggaggaggtagcggaggaggcgggagcggtggaggtggctccgaaatcgtgatgacccagagccctgcaaccctgtccctttctcccggggaacgggctaccctttcttgtcgggcatcacaagatatctcaaaatacctcaattggtatcaacagaagccgggacaggcccctaggcttcttatctaccacacctctcgcctgcatagcgggattcccgcacgctttagcgggtctggaagcgggaccgactacactctgaccatctcatctctccagcccgaggacttcgccgtctacttctgccagcagggtaacaccctgccgtacaccttcggccagggcaccaagcttgagatcaaacatcaccaccatcatcaccatcac

SEQ ID NO: 65 - DNA, 828 bp, synthetic construct
  misc_feature 1..828: note = source = /note="Description of Artificial Sequence: Synthetic polynucleotide"
  source 1..828: mol_type = other DNA
atggccctcccagtgaccgctctgctgctgcctctcgcacttcttctccatgccgctcggcctgagatcgtcatgacccaaagccccgctaccctgtccctgtcacccggcgagagggcaaccctttcatgcagggccagccaggacatttctaagtacctcaactggtatcagcagaagccagggcaggctcctcgcctgctgatctaccacaccagccgcctccacagcggtatccccgccagattttccgggagcgggtctggaaccgactacaccctcaccatctcttctctgcagcccgaggatttcgccgtctatttctgccagcaggggaatactctgccgtacaccttcggtcaaggtaccaagctggaaatcaagggaggcggaggatcaggcggtggcggaagcggaggaggtggctccggaggaggaggttcccaagtgcagcttcaagaatcaggacccggacttgtgaagccatcagaaaccctctccctgacttgtaccgtgtccggtgtgagcctccccgactacggagtctcttggattcgccagcctccggggaagggtcttgaatggattggggtgatttggggatcagagactacttactactcttcatcacttaagtcacgggtcaccatcagcaaagataatagcaagaaccaagtgtcacttaagctgtcatctgtgaccgccgctgacaccgccgtgtactattgtgccaaacattactattacggagggtcttatgctatggactactggggacaggggaccctggtgactgtctctagccatcaccatcaccaccatcatcac

SEQ ID NO: 66 - DNA, 828 bp, synthetic construct
  misc_feature 1..828: note = source = /note="Description of Artificial Sequence: Synthetic polynucleotide"
  source 1..828: mol_type = other DNA
atggccctcccagtgaccgctctgctgctgcctctcgcacttcttctccatgccgctcggcctgagatcgtcatgacccaaagccccgctaccctgtccctgtcacccggcgagagggcaaccctttcatgcagggccagccaggacatttctaagtacctcaactggtatcagcagaagccagggcaggctcctcgcctgctgatctaccacaccagccgcctccacagcggtatccccgccagattttccgggagcgggtctggaaccgactacaccctcaccatctcttctctgcagcccgaggatttcgccgtctatttctgccagcaggggaatactctgccgtacaccttcggtcaaggtaccaagctggaaatcaagggaggcggaggatcaggcggtggcggaagcggaggaggtggctccggaggaggaggttcccaagtgcagcttcaagaatcaggacccggacttgtgaagccatcagaaaccctctccctgacttgtaccgtgtccggtgtgagcctccccgactacggagtctcttggattcgccagcctccggggaagggtcttgaatggattggggtgatttggggatcagagactacttactaccagtcatcacttaagtcacgggtcaccatcagcaaagataatagcaagaaccaagtgtcacttaagctgtcatctgtgaccgccgctgacaccgccgtgtactattgtgccaaacattactattacggagggtcttatgctatggactactggggacaggggaccctggtgactgtctctagccatcaccatcaccaccatcatcac

SEQ ID NO: 67 - DNA, 828 bp, synthetic construct
  misc_feature 1..828: note = source = /note="Description of Artificial Sequence: Synthetic polynucleotide"
  source 1..828: mol_type = other DNA
atggcactgcctgtcactgccctcctgctgcctctggccctccttctgcatgccgccaggccccaagtccagctgcaagagtcaggacccggactggtgaagccgtctgagactctctcactgacttgtaccgtcagcggcgtgtccctccccgactacggagtgtcatggatccgccaacctcccgggaaagggcttgaatggattggtgtcatctggggttctgaaaccacctactactcatcttccctgaagtccagggtgaccatcagcaaggataattccaagaaccaggtcagccttaagctgtcatctgtgaccgctgctgacaccgccgtgtattactgcgccaagcactactattacggaggaagctacgctatggactattggggacagggcactctcgtgactgtgagcagcggcggtggagggtctggaggtggaggatccggtggtggtgggtcaggcggaggagggagcgagattgtgatgactcagtcaccagccaccctttctctttcacccggcgagagagcaaccctgagctgtagagccagccaggacatttctaagtacctcaactggtatcagcaaaaaccggggcaggcccctcgcctcctgatctaccatacctcacgccttcactctggtatccccgctcggtttagcggatcaggatctggtaccgactacactctgaccatttccagcctgcagccagaagatttcgcagtgtatttctgccagcagggcaatacccttccttacaccttcggtcagggaaccaagctcgaaatcaagcaccatcaccatcatcaccaccat

SEQ ID NO: 68 - DNA, 828 bp, synthetic construct
  misc_feature 1..828: note = source = /note="Description of Artificial Sequence: Synthetic polynucleotide"
  source 1..828: mol_type = other DNA
atggcactgcctgtcactgccctcctgctgcctctggccctccttctgcatgccgccaggccccaagtccagctgcaagagtcaggacccggactggtgaagccgtctgagactctctcactgacttgtaccgtcagcggcgtgtccctccccgactacggagtgtcatggatccgccaacctcccgggaaagggcttgaatggattggtgtcatctggggttctgaaaccacctactaccagtcttccctgaagtccagggtgaccatcagcaaggataattccaagaaccaggtcagccttaagctgtcatctgtgaccgctgctgacaccgccgtgtattactgcgccaagcactactattacggaggaagctacgctatggactattggggacagggcactctcgtgactgtgagcagcggcggtggagggtctggaggtggaggatccggtggtggtgggtcaggcggaggagggagcgagattgtgatgactcagtcaccagccaccctttctctttcacccggcgagagagcaaccctgagctgtagagccagccaggacatttctaagtacctcaactggtatcagcaaaaaccggggcaggcccctcgcctcctgatctaccatacctcacgccttcactctggtatccccgctcggtttagcggatcaggatctggtaccgactacactctgaccatttccagcctgcagccagaagatttcgcagtgtatttctgccagcagggcaatacccttccttacaccttcggtcagggaaccaagctcgaaatcaagcaccatcaccatcatcatcaccac

SEQ ID NO: 69 - DNA, 828 bp, synthetic construct
  misc_feature 1..828: note = source = /note="Description of Artificial Sequence: Synthetic polynucleotide"
  source 1..828: mol_type = other DNA
atggccctcccagtgaccgctctgctgctgcctctcgcacttcttctccatgccgctcggcctgagatcgtcatgacccaaagccccgctaccctgtccctgtcacccggcgagagggcaaccctttcatgcagggccagccaggacatttctaagtacctcaactggtatcagcagaagccagggcaggctcctcgcctgctgatctaccacaccagccgcctccacagcggtatccccgccagattttccgggagcgggtctggaaccgactacaccctcaccatctcttctctgcagcccgaggatttcgccgtctatttctgccagcaggggaatactctgccgtacaccttcggtcaaggtaccaagctggaaatcaagggaggcggaggatcaggcggtggcggaagcggaggaggtggctccggaggaggaggttcccaagtgcagcttcaagaatcaggacccggacttgtgaagccatcagaaaccctctccctgacttgtaccgtgtccggtgtgagcctccccgactacggagtctcttggattcgccagcctccggggaagggtcttgaatggattggggtgatttggggatcagagactacttactacaattcatcacttaagtcacgggtcaccatcagcaaagataatagcaagaaccaagtgtcacttaagctgtcatctgtgaccgccgctgacaccgccgtgtactattgtgccaaacattactattacggagggtcttatgctatggactactggggacaggggaccctggtgactgtctctagccatcaccatcaccaccatcatcac

SEQ ID NO: 70 - DNA, 828 bp, synthetic construct
  misc_feature 1..828: note = source = /note="Description of Artificial Sequence: Synthetic polynucleotide"
  source 1..828: mol_type = other DNA
atggcactgcctgtcactgccctcctgctgcctctggccctccttctgcatgccgccaggccccaagtccagctgcaagagtcaggacccggactggtgaagccgtctgagactctctcactgacttgtaccgtcagcggcgtgtccctccccgactacggagtgtcatggatccgccaacctcccgggaaagggcttgaatggattggtgtcatctggggttctgaaaccacctactacaactcttccctgaagtccagggtgaccatcagcaaggataattccaagaaccaggtcagccttaagctgtcatctgtgaccgctgctgacaccgccgtgtattactgcgccaagcactactattacggaggaagctacgctatggactattggggacagggcactctcgtgactgtgagcagcggcggtggagggtctggaggtggaggatccggtggtggtgggtcaggcggaggagggagcgagattgtgatgactcagtcaccagccaccctttctctttcacccggcgagagagcaaccctgagctgtagagccagccaggacatttctaagtacctcaactggtatcagcaaaaaccggggcaggcccctcgcctcctgatctaccatacctcacgccttcactctggtatccccgctcggtttagcggatcaggatctggtaccgactacactctgaccatttccagcctgcagccagaagatttcgcagtgtatttctgccagcagggcaatacccttccttacaccttcggtcagggaaccaagctcgaaatcaagcaccatcaccatcatcaccaccat

SEQ ID NO: 71 - DNA, 813 bp, synthetic construct
  misc_feature 1..813: note = source = /note="Description of Artificial Sequence: Synthetic polynucleotide"
  source 1..813: mol_type = other DNA
atggccctccctgtcaccgccctgctgcttccgctggctcttctgctccacgccgctcggcccgaaattgtgatgacccagtcacccgccactcttagcctttcacccggtgagcgcgcaaccctgtcttgcagagcctcccaagacatctcaaaataccttaattggtatcaacagaagcccggacaggctcctcgccttctgatctaccacaccagccggctccattctggaatccctgccaggttcagcggtagcggatctgggaccgactacaccctcactatcagctcactgcagccagaggacttcgctgtctatttctgtcagcaagggaacaccctgccctacacctttggacagggcaccaagctcgagattaaaggtggaggtggcagcggaggaggtgggtccggcggtggaggaagccaggtccaactccaagaaagcggaccgggtcttgtgaagccatcagaaactctttcactgacttgtactgtgagcggagtgtctctccccgattacggggtgtcttggatcagacagccaccggggaagggtctggaatggattggagtgatttggggctctgagactacttactacaattcatccctcaagtcacgcgtcaccatctcaaaggacaactctaagaatcaggtgtcactgaaactgtcatctgtgaccgcagccgacaccgccgtgtactattgcgctaagcattactattatggcgggagctacgcaatggattactggggacagggtactctggtcaccgtgtccagccaccaccatcatcaccatcaccat

SEQ ID NO: 72 - DNA, 813 bp, synthetic construct
  misc_feature 1..813: note = source = /note="Description of Artificial Sequence: Synthetic polynucleotide"
  source 1..813: mol_type = other DNA
atggctctgcccgtgaccgcactcctcctgccactggctctgctgcttcacgccgctcgcccacaagtccagcttcaagaatcagggcctggtctggtgaagccatctgagactctgtccctcacttgcaccgtgagcggagtgtccctcccagactacggagtgagctggattagacagcctcccggaaagggactggagtggatcggagtgatttggggtagcgaaaccacttactataactcttccctgaagtcacgggtcaccatttcaaaggataactcaaagaatcaagtgagcctcaagctctcatcagtcaccgccgctgacaccgccgtgtattactgtgccaagcattactactatggagggtcctacgccatggactactggggccagggaactctggtcactgtgtcatctggtggaggaggtagcggaggaggcgggagcggtggaggtggctccgaaatcgtgatgacccagagccctgcaaccctgtccctttctcccggggaacgggctaccctttcttgtcgggcatcacaagatatctcaaaatacctcaattggtatcaacagaagccgggacaggcccctaggcttcttatctaccacacctctcgcctgcatagcgggattcccgcacgctttagcgggtctggaagcgggaccgactacactctgaccatctcatctctccagcccgaggacttcgccgtctacttctgccagcagggtaacaccctgccgtacaccttcggccagggcaccaagcttgagatcaaacatcaccaccatcatcaccatcac

SEQ ID NO: 73 - protein, 271 aa, synthetic construct
  REGION 1..271: note = source = /note="Description of Artificial Sequence: Synthetic polypeptide"
MALPVTALLLPLALLLHAARPEIVMTQSPATLSLSPGERATLSCRASQDISKYLNWYQQKPGQAPRLLIYHTSRLHSGIPARFSGSGSGTDYTLTISSLQPEDFAVYFCQQGNTLPYTFGQGTKLEIKGGGGSGGGGSGGGGSQVQLQESGPGLVKPSETLSLTCTVSGVSLPDYGVSWIRQPPGKGLEWIGVIWGSETTYYSSSLKSRVTISKDNSKNQVSLKLSSVTAADTAVYYCAKHYYYGGSYAMDYWGQGTLVTVSSHHHHHHHH

SEQ ID NO: 74 - protein, 271 aa, synthetic construct
  REGION 1..271: note = source = /note="Description of Artificial Sequence: Synthetic polypeptide"
MALPVTALLLPLALLLHAARPEIVMTQSPATLSLSPGERATLSCRASQDISKYLNWYQQKPGQAPRLLIYHTSRLHSGIPARFSGSGSGTDYTLTISSLQPEDFAVYFCQQGNTLPYTFGQGTKLEIKGGGGSGGGGSGGGGSQVQLQESGPGLVKPSETLSLTCTVSGVSLPDYGVSWIRQPPGKGLEWIGVIWGSETTYYQSSLKSRVTISKDNSKNQVSLKLSSVTAADTAVYYCAKHYYYGGSYAMDYWGQGTLVTVSSHHHHHHHH

SEQ ID NO: 75 - protein, 271 aa, synthetic construct
  REGION 1..271: note = source = /note="Description of Artificial Sequence: Synthetic polypeptide"
MALPVTALLLPLALLLHAARPQVQLQESGPGLVKPSETLSLTCTVSGVSLPDYGVSWIRQPPGKGLEWIGVIWGSETTYYSSSLKSRVTISKDNSKNQVSLKLSSVTAADTAVYYCAKHYYYGGSYAMDYWGQGTLVTVSSGGGGSGGGGSGGGGSEIVMTQSPATLSLSPGERATLSCRASQDISKYLNWYQQKPGQAPRLLIYHTSRLHSGIPARFSGSGSGTDYTLTISSLQPEDFAVYFCQQGNTLPYTFGQGTKLEIKHHHHHHHH

SEQ ID NO: 76 - protein, 271 aa, synthetic construct
  REGION 1..271: note = source = /note="Description of Artificial Sequence: Synthetic polypeptide"
MALPVTALLLPLALLLHAARPQVQLQESGPGLVKPSETLSLTCTVSGVSLPDYGVSWIRQPPGKGLEWIGVIWGSETTYYQSSLKSRVTISKDNSKNQVSLKLSSVTAADTAVYYCAKHYYYGGSYAMDYWGQGTLVTVSSGGGGSGGGGSGGGGSEIVMTQSPATLSLSPGERATLSCRASQDISKYLNWYQQKPGQAPRLLIYHTSRLHSGIPARFSGSGSGTDYTLTISSLQPEDFAVYFCQQGNTLPYTFGQGTKLEIKHHHHHHHH

SEQ ID NO: 77 - protein, 276 aa, synthetic construct
  REGION 1..276: note = source = /note="Description of Artificial Sequence: Synthetic polypeptide"
MALPVTALLLPLALLLHAARPEIVMTQSPATLSLSPGERATLSCRASQDISKYLNWYQQKPGQAPRLLIYHTSRLHSGIPARFSGSGSGTDYTLTISSLQPEDFAVYFCQQGNTLPYTFGQGTKLEIKGGGGSGGGGSGGGGSGGGGSQVQLQESGPGLVKPSETLSLTCTVSGVSLPDYGVSWIRQPPGKGLEWIGVIWGSETTYYSSSLKSRVTISKDNSKNQVSLKLSSVTAADTAVYYCAKHYYYGGSYAMDYWGQGTLVTVSSHHHHHHHH

SEQ ID NO: 78 - protein, 276 aa, synthetic construct
  REGION 1..276: note = source = /note="Description of Artificial Sequence: Synthetic polypeptide"
MALPVTALLLPLALLLHAARPEIVMTQSPATLSLSPGERATLSCRASQDISKYLNWYQQKPGQAPRLLIYHTSRLHSGIPARFSGSGSGTDYTLTISSLQPEDFAVYFCQQGNTLPYTFGQGTKLEIKGGGGSGGGGSGGGGSGGGGSQVQLQESGPGLVKPSETLSLTCTVSGVSLPDYGVSWIRQPPGKGLEWIGVIWGSETTYYQSSLKSRVTISKDNSKNQVSLKLSSVTAADTAVYYCAKHYYYGGSYAMDYWGQGTLVTVSSHHHHHHHH

SEQ ID NO: 79 - protein, 276 aa, synthetic construct
  REGION 1..276: note = source = /note="Description of Artificial Sequence: Synthetic polypeptide"
MALPVTALLLPLALLLHAARPQVQLQESGPGLVKPSETLSLTCTVSGVSLPDYGVSWIRQPPGKGLEWIGVIWGSETTYYSSSLKSRVTISKDNSKNQVSLKLSSVTAADTAVYYCAKHYYYGGSYAMDYWGQGTLVTVSSGGGGSGGGGSGGGGSGGGGSEIVMTQSPATLSLSPGERATLSCRASQDISKYLNWYQQKPGQAPRLLIYHTSRLHSGIPARFSGSGSGTDYTLTISSLQPEDFAVYFCQQGNTLPYTFGQGTKLEIKHHHHHHHH

SEQ ID NO: 80 - protein, 276 aa, synthetic construct
  REGION 1..276: note = source = /note="Description of Artificial Sequence: Synthetic polypeptide"
MALPVTALLLPLALLLHAARPQVQLQESGPGLVKPSETLSLTCTVSGVSLPDYGVSWIRQPPGKGLEWIGVIWGSETTYYQSSLKSRVTISKDNSKNQVSLKLSSVTAADTAVYYCAKHYYYGGSYAMDYWGQGTLVTVSSGGGGSGGGGSGGGGSGGGGSEIVMTQSPATLSLSPGERATLSCRASQDISKYLNWYQQKPGQAPRLLIYHTSRLHSGIPARFSGSGSGTDYTLTISSLQPEDFAVYFCQQGNTLPYTFGQGTKLEIKHHHHHHHH

SEQ ID NO: 81 - protein, 276 aa, synthetic construct
  REGION 1..276: note = source = /note="Description of Artificial Sequence: Synthetic polypeptide"
MALPVTALLLPLALLLHAARPEIVMTQSPATLSLSPGERATLSCRASQDISKYLNWYQQKPGQAPRLLIYHTSRLHSGIPARFSGSGSGTDYTLTISSLQPEDFAVYFCQQGNTLPYTFGQGTKLEIKGGGGSGGGGSGGGGSGGGGSQVQLQESGPGLVKPSETLSLTCTVSGVSLPDYGVSWIRQPPGKGLEWIGVIWGSETTYYNSSLKSRVTISKDNSKNQVSLKLSSVTAADTAVYYCAKHYYYGGSYAMDYWGQGTLVTVSSHHHHHHHH

SEQ ID NO: 82 - protein, 276 aa, synthetic construct
  REGION 1..276: note = source = /note="Description of Artificial Sequence: Synthetic polypeptide"
MALPVTALLLPLALLLHAARPQVQLQESGPGLVKPSETLSLTCTVSGVSLPDYGVSWIRQPPGKGLEWIGVIWGSETTYYNSSLKSRVTISKDNSKNQVSLKLSSVTAADTAVYYCAKHYYYGGSYAMDYWGQGTLVTVSSGGGGSGGGGSGGGGSGGGGSEIVMTQSPATLSLSPGERATLSCRASQDISKYLNWYQQKPGQAPRLLIYHTSRLHSGIPARFSGSGSGTDYTLTISSLQPEDFAVYFCQQGNTLPYTFGQGTKLEIKHHHHHHHH

SEQ ID NO: 83 - protein, 271 aa, synthetic construct
  REGION 1..271: note = source = /note="Description of Artificial Sequence: Synthetic polypeptide"
MALPVTALLLPLALLLHAARPEIVMTQSPATLSLSPGERATLSCRASQDISKYLNWYQQKPGQAPRLLIYHTSRLHSGIPARFSGSGSGTDYTLTISSLQPEDFAVYFCQQGNTLPYTFGQGTKLEIKGGGGSGGGGSGGGGSQVQLQESGPGLVKPSETLSLTCTVSGVSLPDYGVSWIRQPPGKGLEWIGVIWGSETTYYNSSLKSRVTISKDNSKNQVSLKLSSVTAADTAVYYCAKHYYYGGSYAMDYWGQGTLVTVSSHHHHHHHH

SEQ ID NO: 84 - protein, 271 aa, synthetic construct
  REGION 1..271: note = source = /note="Description of Artificial Sequence: Synthetic polypeptide"
MALPVTALLLPLALLLHAARPQVQLQESGPGLVKPSETLSLTCTVSGVSLPDYGVSWIRQPPGKGLEWIGVIWGSETTYYNSSLKSRVTISKDNSKNQVSLKLSSVTAADTAVYYCAKHYYYGGSYAMDYWGQGTLVTVSSGGGGSGGGGSGGGGSEIVMTQSPATLSLSPGERATLSCRASQDISKYLNWYQQKPGQAPRLLIYHTSRLHSGIPARFSGSGSGTDYTLTISSLQPEDFAVYFCQQGNTLPYTFGQGTKLEIKHHHHHHHH

SEQ ID NO: 85 - DNA, 1458 bp, synthetic construct
  misc_feature 1..1458: note = source = /note="Description of Artificial Sequence: Synthetic polynucleotide"
  source 1..1458: mol_type = other DNA
atggccctccctgtcaccgccctgctgcttccgctggctcttctgctccacgccgctcggcccgaaattgtgatgacccagtcacccgccactcttagcctttcacccggtgagcgcgcaaccctgtcttgcagagcctcccaagacatctcaaaataccttaattggtatcaacagaagcccggacaggctcctcgccttctgatctaccacaccagccggctccattctggaatccctgccaggttcagcggtagcggatctgggaccgactacaccctcactatcagctcactgcagccagaggacttcgctgtctatttctgtcagcaagggaacaccctgccctacacctttggacagggcaccaagctcgagattaaaggtggaggtggcagcggaggaggtgggtccggcggtggaggaagccaggtccaactccaagaaagcggaccgggtcttgtgaagccatcagaaactctttcactgacttgtactgtgagcggagtgtctctccccgattacggggtgtcttggatcagacagccaccggggaagggtctggaatggattggagtgatttggggctctgagactacttactactcttcatccctcaagtcacgcgtcaccatctcaaaggacaactctaagaatcaggtgtcactgaaactgtcatctgtgaccgcagccgacaccgccgtgtactattgcgctaagcattactattatggcgggagctacgcaatggattactggggacagggtactctggtcaccgtgtccagcaccactaccccagcaccgaggccacccaccccggctcctaccatcgcctcccagcctctgtccctgcgtccggaggcatgtagacccgcagctggtggggccgtgcatacccggggtcttgacttcgcctgcgatatctacatttgggcccctctggctggtacttgcggggtcctgctgctttcactcgtgatcactctttactgtaagcgcggtcggaagaagctgctgtacatctttaagcaacccttcatgaggcctgtgcagactactcaagaggaggacggctgttcatgccggttcccagaggaggaggaaggcggctgcgaactgcgcgtgaaattcagccgcagcgcagatgctccagcctacaagcaggggcagaaccagctctacaacgaactcaatcttggtcggagagaggagtacgacgtgctggacaagcggagaggacgggacccagaaatgggcgggaagccgcgcagaaagaatccccaagagggcctgtacaacgagctccaaaaggataagatggcagaagcctatagcgagattggtatgaaaggggaacgcagaagaggcaaaggccacgacggactgtaccagggactcagcaccgccaccaaggacacctatgacgctcttcacatgcaggccctgccgcctcgg

SEQ ID NO: 86 - DNA, 1458 bp, synthetic construct
  misc_feature 1..1458: note = source = /note="Description of Artificial Sequence: Synthetic polynucleotide"
  source 1..1458: mol_type = other DNA
atggccctccctgtcaccgccctgctgcttccgctggctcttctgctccacgccgctcggcccgaaattgtgatgacccagtcacccgccactcttagcctttcacccggtgagcgcgcaaccctgtcttgcagagcctcccaagacatctcaaaataccttaattggtatcaacagaagcccggacaggctcctcgccttctgatctaccacaccagccggctccattctggaatccctgccaggttcagcggtagcggatctgggaccgactacaccctcactatcagctcactgcagccagaggacttcgctgtctatttctgtcagcaagggaacaccctgccctacacctttggacagggcaccaagctcgagattaaaggtggaggtggcagcggaggaggtgggtccggcggtggaggaagccaggtccaactccaagaaagcggaccgggtcttgtgaagccatcagaaactctttcactgacttgtactgtgagcggagtgtctctccccgattacggggtgtcttggatcagacagccaccggggaagggtctggaatggattggagtgatttggggctctgagactacttactaccaatcatccctcaagtcacgcgtcaccatctcaaaggacaactctaagaatcaggtgtcactgaaactgtcatctgtgaccgcagccgacaccgccgtgtactattgcgctaagcattactattatggcgggagctacgcaatggattactggggacagggtactctggtcaccgtgtccagcaccactaccccagcaccgaggccacccaccccggctcctaccatcgcctcccagcctctgtccctgcgtccggaggcatgtagacccgcagctggtggggccgtgcatacccggggtcttgacttcgcctgcgatatctacatttgggcccctctggctggtacttgcggggtcctgctgctttcactcgtgatcactctttactgtaagcgcggtcggaagaagctgctgtacatctttaagcaacccttcatgaggcctgtgcagactactcaagaggaggacggctgttcatgccggttcccagaggaggaggaaggcggctgcgaactgcgcgtgaaattcagccgcagcgcagatgctccagcctacaagcaggggcagaaccagctctacaacgaactcaatcttggtcggagagaggagtacgacgtgctggacaagcggagaggacgggacccagaaatgggcgggaagccgcgcagaaagaatccccaagagggcctgtacaacgagctccaaaaggataagatggcagaagcctatagcgagattggtatgaaaggggaacgcagaagaggcaaaggccacgacggactgtaccagggactcagcaccgccaccaaggacacctatgacgctcttcacatgcaggccctgccgcctcgg

SEQ ID NO: 87 - DNA, 1458 bp, synthetic construct
  misc_feature 1..1458: note = source = /note="Description of Artificial Sequence: Synthetic polynucleotide"
  source 1..1458: mol_type = other DNA
atggctctgcccgtgaccgcactcctcctgccactggctctgctgcttcacgccgctcgcccacaagtccagcttcaagaatcagggcctggtctggtgaagccatctgagactctgtccctcacttgcaccgtgagcggagtgtccctcccagactacggagtgagctggattagacagcctcccggaaagggactggagtggatcggagtgatttggggtagcgaaaccacttactattcatcttccctgaagtcacgggtcaccatttcaaaggataactcaaagaatcaagtgagcctcaagctctcatcagtcaccgccgctgacaccgccgtgtattactgtgccaagcattactactatggagggtcctacgccatggactactggggccagggaactctggtcactgtgtcatctggtggaggaggtagcggaggaggcgggagcggtggaggtggctccgaaatcgtgatgacccagagccctgcaaccctgtccctttctcccggggaacgggctaccctttcttgtcgggcatcacaagatatctcaaaatacctcaattggtatcaacagaagccgggacaggcccctaggcttcttatctaccacacctctcgcctgcatagcgggattcccgcacgctttagcgggtctggaagcgggaccgactacactctgaccatctcatctctccagcccgaggacttcgccgtctacttctgccagcagggtaacaccctgccgtacaccttcggccagggcaccaagcttgagatcaaaaccactactcccgctccaaggccacccacccctgccccgaccatcgcctctcagccgctttccctgcgtccggaggcatgtagacccgcagctggtggggccgtgcatacccggggtcttgacttcgcctgcgatatctacatttgggcccctctggctggtacttgcggggtcctgctgctttcactcgtgatcactctttactgtaagcgcggtcggaagaagctgctgtacatctttaagcaacccttcatgaggcctgtgcagactactcaagaggaggacggctgttcatgccggttcccagaggaggaggaaggcggctgcgaactgcgcgtgaaattcagccgcagcgcagatgctccagcctacaagcaggggcagaaccagctctacaacgaactcaatcttggtcggagagaggagtacgacgtgctggacaagcggagaggacgggacccagaaatgggcgggaagccgcgcagaaagaatccccaagagggcctgtacaacgagctccaaaaggataagatggcagaagcctatagcgagattggtatgaaaggggaacgcagaagaggcaaaggccacgacggactgtaccagggactcagcaccgccaccaaggacacctatgacgctcttcacatgcaggccctgccgcctcgg

SEQ ID NO: 88 - DNA, 1458 bp, synthetic construct
  misc_feature 1..1458: note = source = /note="Description of Artificial Sequence: Synthetic polynucleotide"
  source 1..1458: mol_type = other DNA
atggctctgcccgtgaccgcactcctcctgccactggctctgctgcttcacgccgctcgcccacaagtccagcttcaagaatcagggcctggtctggtgaagccatctgagactctgtccctcacttgcaccgtgagcggagtgtccctcccagactacggagtgagctggattagacagcctcccggaaagggactggagtggatcggagtgatttggggtagcgaaaccacttactatcaatcttccctgaagtcacgggtcaccatttcaaaggataactcaaagaatcaagtgagcctcaagctctcatcagtcaccgccgctgacaccgccgtgtattactgtgccaagcattactactatggagggtcctacgccatggactactggggccagggaactctggtcactgtgtcatctggtggaggaggtagcggaggaggcgggagcggtggaggtggctccgaaatcgtgatgacccagagccctgcaaccctgtccctttctcccggggaacgggctaccctttcttgtcgggcatcacaagatatctcaaaatacctcaattggtatcaacagaagccgggacaggcccctaggcttcttatctaccacacctctcgcctgcatagcgggattcccgcacgctttagcgggtctggaagcgggaccgactacactctgaccatctcatctctccagcccgaggacttcgccgtctacttctgccagcagggtaacaccctgccgtacaccttcggccagggcaccaagcttgagatcaaaaccactactcccgctccaaggccacccacccctgccccgaccatcgcctctcagccgctttccctgcgtccggaggcatgtagacccgcagctggtggggccgtgcatacccggggtcttgacttcgcctgcgatatctacatttgggcccctctggctggtacttgcggggtcctgctgctttcactcgtgatcactctttactgtaagcgcggtcggaagaagctgctgtacatctttaagcaacccttcatgaggcctgtgcagactactcaagaggaggacggctgttcatgccggttcccagaggaggaggaaggcggctgcgaactgcgcgtgaaattcagccgcagcgcagatgctccagcctacaagcaggggcagaaccagctctacaacgaactcaatcttggtcggagagaggagtacgacgtgctggacaagcggagaggacgggacccagaaatgggcgggaagccgcgcagaaagaatccccaagagggcctgtacaacgagctccaaaaggataagatggcagaagcctatagcgagattggtatgaaaggggaacgcagaagaggcaaaggccacgacggactgtaccagggactcagcaccgccaccaaggacacctatgacgctcttcacatgcaggccctgccgcctcgg

SEQ ID NO: 89 - DNA, 1473 bp, synthetic construct
  misc_feature 1..1473: note = source = /note="Description of Artificial Sequence: Synthetic polynucleotide"
  source 1..1473: mol_type = other DNA
atggccctccctgtcaccgccctgctgcttccgctggctcttctgctccacgccgctcggcccgaaattgtgatgacccagtcacccgccactcttagcctttcacccggtgagcgcgcaaccctgtcttgcagagcctcccaagacatctcaaaataccttaattggtatcaacagaagcccggacaggctcctcgccttctgatctaccacaccagccggctccattctggaatccctgccaggttcagcggtagcggatctgggaccgactacaccctcactatcagctcactgcagccagaggacttcgctgtctatttctgtcagcaagggaacaccctgccctacacctttggacagggcaccaagctcgagattaaaggtggaggtggcagcggaggaggtgggtccggcggtggaggaagcggcggaggcgggagccaggtccaactccaagaaagcggaccgggtcttgtgaagccatcagaaactctttcactgacttgtactgtgagcggagtgtctctccccgattacggggtgtcttggatcagacagccaccggggaagggtctggaatggattggagtgatttggggctctgagactacttactactcttcatccctcaagtcacgcgtcaccatctcaaaggacaactctaagaatcaggtgtcactgaaactgtcatctgtgaccgcagccgacaccgccgtgtactattgcgctaagcattactattatggcgggagctacgcaatggattactggggacagggtactctggtcaccgtgtccagcaccactaccccagcaccgaggccacccaccccggctcctaccatcgcctcccagcctctgtccctgcgtccggaggcatgtagacccgcagctggtggggccgtgcatacccggggtcttgacttcgcctgcgatatctacatttgggcccctctggctggtacttgcggggtcctgctgctttcactcgtgatcactctttactgtaagcgcggtcggaagaagctgctgtacatctttaagcaacccttcatgaggcctgtgcagactactcaagaggaggacggctgttcatgccggttcccagaggaggaggaaggcggctgcgaactgcgcgtgaaattcagccgcagcgcagatgctccagcctacaagcaggggcagaaccagctctacaacgaactcaatcttggtcggagagaggagtacgacgtgctggacaagcggagaggacgggacccagaaatgggcgggaagccgcgcagaaagaatccccaagagggcctgtacaacgagctccaaaaggataagatggcagaagcctatagcgagattggtatgaaaggggaacgcagaagaggcaaaggccacgacggactgtaccagggactcagcaccgccaccaaggacacctatgacgctcttcacatgcaggccctgccgcctcgg

SEQ ID NO: 90 - DNA, 1473 bp, synthetic construct
  misc_feature 1..1473: note = source = /note="Description of Artificial Sequence: Synthetic polynucleotide"
  source 1..1473: mol_type = other DNA
atggccctccctgtcaccgccctgctgcttccgctggctcttctgctccacgccgctcggcccgaaattgtgatgacccagtcacccgccactcttagcctttcacccggtgagcgcgcaaccctgtcttgcagagcctcccaagacatctcaaaataccttaattggtatcaacagaagcccggacaggctcctcgccttctgatctaccacaccagccggctccattctggaatccctgccaggttcagcggtagcggatctgggaccgactacaccctcactatcagctcactgcagccagaggacttcgctgtctatttctgtcagcaagggaacaccctgccctacacctttggacagggcaccaagctcgagattaaaggtggaggtggcagcggaggaggtgggtccggcggtggaggaagcggaggcggagggagccaggtccaactccaagaaagcggaccgggtcttgtgaagccatcagaaactctttcactgacttgtactgtgagcggagtgtctctccccgattacggggtgtcttggatcagacagccaccggggaagggtctggaatggattggagtgatttggggctctgagactacttactaccaatcatccctcaagtcacgcgtcaccatctcaaaggacaactctaagaatcaggtgtcactgaaactgtcatctgtgaccgcagccgacaccgccgtgtactattgcgctaagcattactattatggcgggagctacgcaatggattactggggacagggtactctggtcaccgtgtccagcaccactaccccagcaccgaggccacccaccccggctcctaccatcgcctcccagcctctgtccctgcgtccggaggcatgtagacccgcagctggtggggccgtgcatacccggggtcttgacttcgcctgcgatatctacatttgggcccctctggctggtacttgcggggtcctgctgctttcactcgtgatcactctttactgtaagcgcggtcggaagaagctgctgtacatctttaagcaacccttcatgaggcctgtgcagactactcaagaggaggacggctgttcatgccggttcccagaggaggaggaaggcggctgcgaactgcgcgtgaaattcagccgcagcgcagatgctccagcctacaagcaggggcagaaccagctctacaacgaactcaatcttggtcggagagaggagtacgacgtgctggacaagcggagaggacgggacccagaaatgggcgggaagccgcgcagaaagaatccccaagagggcctgtacaacgagctccaaaaggataagatggcagaagcctatagcgagattggtatgaaaggggaacgcagaagaggcaaaggccacgacggactgtaccagggactcagcaccgccaccaaggacacctatgacgctcttcacatgcaggccctgccgcctcgg

SEQ ID NO: 91 - DNA, 1473 bp, synthetic construct
  misc_feature 1..1473: note = source = /note="Description of Artificial Sequence: Synthetic polynucleotide"
  source 1..1473: mol_type = other DNA
atggctctgcccgtgaccgcactcctcctgccactggctctgctgcttcacgccgctcgcccacaagtccagcttcaagaatcagggcctggtctggtgaagccatctgagactctgtccctcacttgcaccgtgagcggagtgtccctcccagactacggagtgagctggattagacagcctcccggaaagggactggagtggatcggagtgatttggggtagcgaaaccacttactattcatcttccctgaagtcacgggtcaccatttcaaaggataactcaaagaatcaagtgagcctcaagctctcatcagtcaccgccgctgacaccgccgtgtattactgtgccaagcattactactatggagggtcctacgccatggactactggggccagggaactctggtcactgtgtcatctggtggaggaggtagcggaggaggcgggagcggtggaggtggctccggaggtggcggaagcgaaatcgtgatgacccagagccctgcaaccctgtccctttctcccggggaacgggctaccctttcttgtcgggcatcacaagatatctcaaaatacctcaattggtatcaacagaagccgggacaggcccctaggcttcttatctaccacacctctcgcctgcatagcgggattcccgcacgctttagcgggtctggaagcgggaccgactacactctgaccatctcatctctccagcccgaggacttcgccgtctacttctgccagcagggtaacaccctgccgtacaccttcggccagggcaccaagcttgagatcaaaaccactactcccgctccaaggccacccacccctgccccgaccatcgcctctcagccgctttccctgcgtccggaggcatgtagacccgcagctggtggggccgtgcatacccggggtcttgacttcgcctgcgatatctacatttgggcccctctggctggtacttgcggggtcctgctgctttcactcgtgatcactctttactgtaagcgcggtcggaagaagctgctgtacatctttaagcaacccttcatgaggcctgtgcagactactcaagaggaggacggctgttcatgccggttcccagaggaggaggaaggcggctgcgaactgcgcgtgaaattcagccgcagcgcagatgctccagcctacaagcaggggcagaaccagctctacaacgaactcaatcttggtcggagagaggagtacgacgtgctggacaagcggagaggacgggacccagaaatgggcgggaagccgcgcagaaagaatccccaagagggcctgtacaacgagctccaaaaggataagatggcagaagcctatagcgagattggtatgaaaggggaacgcagaagaggcaaaggccacgacggactgtaccagggactcagcaccgccaccaaggacacctatgacgctcttcacatgcaggccctgccgcctcgg

SEQ ID NO: 92 - DNA, 1473 bp, synthetic construct
  misc_feature 1..1473: note = source = /note="Description of Artificial Sequence: Synthetic polynucleotide"
  source 1..1473: mol_type = other DNA
atggctctgcccgtgaccgcactcctcctgccactggctctgctgcttcacgccgctcgcccacaagtccagcttcaagaatcagggcctggtctggtgaagccatctgagactctgtccctcacttgcaccgtgagcggagtgtccctcccagactacggagtgagctggattagacagcctcccggaaagggactggagtggatcggagtgatttggggtagcgaaaccacttactatcaatcttccctgaagtcacgggtcaccatttcaaaggataactcaaagaatcaagtgagcctcaagctctcatcagtcaccgccgctgacaccgccgtgtattactgtgccaagcattactactatggagggtcctacgccatggactactggggccagggaactctggtcactgtgtcatctggtggaggaggtagcggaggaggcgggagcggtggaggtggctccggaggcggtgggtcagaaatcgtgatgacccagagccctgcaaccctgtccctttctcccggggaacgggctaccctttcttgtcgggcatcacaagatatctcaaaatacctcaattggtatcaacagaagccgggacaggcccctaggcttcttatctaccacacctctcgcctgcatagcgggattcccgcacgctttagcgggtctggaagcgggaccgactacactctgaccatctcatctctccagcccgaggacttcgccgtctacttctgccagcagggtaacaccctgccgtacaccttcggccagggcaccaagcttgagatcaaaaccactactcccgctccaaggccacccacccctgccccgaccatcgcctctcagccgctttccctgcgtccggaggcatgtagacccgcagctggtggggccgtgcatacccggggtcttgacttcgcctgcgatatctacatttgggcccctctggctggtacttgcggggtcctgctgctttcactcgtgatcactctttactgtaagcgcggtcggaagaagctgctgtacatctttaagcaacccttcatgaggcctgtgcagactactcaagaggaggacggctgttcatgccggttcccagaggaggaggaaggcggctgcgaactgcgcgtgaaattcagccgcagcgcagatgctccagcctacaagcaggggcagaaccagctctacaacgaactcaatcttggtcggagagaggagtacgacgtgctggacaagcggagaggacgggacccagaaatgggcgggaagccgcgcagaaagaatccccaagagggcctgtacaacgagctccaaaaggataagatggcagaagcctatagcgagattggtatgaaaggggaacgcagaagaggcaaaggccacgacggactgtaccagggactcagcaccgccaccaaggacacctatgacgctcttcacatgcaggccctgccgcctcgg

SEQ ID NO: 93 - DNA, 1473 bp, synthetic construct
  misc_feature 1..1473: note = source = /note="Description of Artificial Sequence: Synthetic polynucleotide"
  source 1..1473: mol_type = other DNA
atggccctccctgtcaccgccctgctgcttccgctggctcttctgctccacgccgctcggcccgaaattgtgatgacccagtcacccgccactcttagcctttcacccggtgagcgcgcaaccctgtcttgcagagcctcccaagacatctcaaaataccttaattggtatcaacagaagcccggacaggctcctcgccttctgatctaccacaccagccggctccattctggaatccctgccaggttcagcggtagcggatctgggaccgactacaccctcactatcagctcactgcagccagaggacttcgctgtctatttctgtcagcaagggaacaccctgccctacacctttggacagggcaccaagctcgagattaaaggtggaggtggcagcggaggaggtgggtccggcggtggaggaagcggaggcggtgggagccaggtccaactccaagaaagcggaccgggtcttgtgaagccatcagaaactctttcactgacttgtactgtgagcggagtgtctctccccgattacggggtgtcttggatcagacagccaccggggaagggtctggaatggattggagtgatttggggctctgagactacttactacaactcatccctcaagtcacgcgtcaccatctcaaaggacaactctaagaatcaggtgtcactgaaactgtcatctgtgaccgcagccgacaccgccgtgtactattgcgctaagcattactattatggcgggagctacgcaatggattactggggacagggtactctggtcaccgtgtccagcaccactaccccagcaccgaggccacccaccccggctcctaccatcgcctcccagcctctgtccctgcgtccggaggcatgtagacccgcagctggtggggccgtgcatacccggggtcttgacttcgcctgcgatatctacatttgggcccctctggctggtacttgcggggtcctgctgctttcactcgtgatcactctttactgtaagcgcggtcggaagaagctgctgtacatctttaagcaacccttcatgaggcctgtgcagactactcaagaggaggacggctgttcatgccggttcccagaggaggaggaaggcggctgcgaactgcgcgtgaaattcagccgcagcgcagatgctccagcctacaagcaggggcagaaccagctctacaacgaactcaatcttggtcggagagaggagtacgacgtgctggacaagcggagaggacgggacccagaaatgggcgggaagccgcgcagaaagaatccccaagagggcctgtacaacgagctccaaaaggataagatggcagaagcctatagcgagattggtatgaaaggggaacgcagaagaggcaaaggccacgacggactgtaccagggactcagcaccgccaccaaggacacctatgacgctcttcacatgcaggccctgccgcctcgg

SEQ ID NO: 94 - DNA, 1473 bp, synthetic construct; identical to SEQ ID NO: 93
  misc_feature 1..1473: note = source = /note="Description of Artificial Sequence: Synthetic polynucleotide"
  source 1..1473: mol_type = other DNA

SEQ ID NO: 95 - DNA, 1473 bp, synthetic construct
  misc_feature 1..1473: note = source = /note="Description of Artificial Sequence: Synthetic polynucleotide"
  source 1..1473: mol_type = other DNA
atggctctgcccgtgaccgcactcctcctgccactggctctgctgcttcacgccgctcgcccacaagtccagcttcaagaatcagggcctggtctggtgaagccatctgagactctgtccctcacttgcaccgtgagcggagtgtccctcccagactacggagtgagctggattagacagcctcccggaaagggactggagtggatcggagtgatttggggtagcgaaaccacttactataactcttccctgaagtcacgggtcaccatttcaaaggataactcaaagaatcaagtgagcctcaagctctcatcagtcaccgccgctgacaccgccgtgtattactgtgccaagcattactactatggagggtcctacgccatggactactggggccagggaactctggtcactgtgtcatctggtggaggaggtagcggaggaggcgggagcggtggaggtggctccggaggtggcggaagcgaaatcgtgatgacccagagccctgcaaccctgtccctttctcccggggaacgggctaccctttcttgtcgggcatcacaagatatctcaaaatacctcaattggtatcaacagaagccgggacaggcccctaggcttcttatctaccacacctctcgcctgcatagcgggattcccgcacgctttagcgggtctggaagcgggaccgactacactctgaccatctcatctctccagcccgaggacttcgccgtctacttctgccagcagggtaacaccctgccgtacaccttcggccagggcaccaagcttgagatcaaaaccactactcccgctccaaggccacccacccctgccccgaccatcgcctctcagccgctttccctgcgtccggaggcatgtagacccgcagctggtggggccgtgcatacccggggtcttgacttcgcctgcgatatctacatttgggcccctctggctggtacttgcggggtcctgctgctttcactcgtgatcactctttactgtaagcgcggtcggaagaagctgctgtacatctttaagcaacccttcatgaggcctgtgcagactactcaagaggaggacggctgttcatgccggttcccagaggaggaggaaggcggctgcgaactgcgcgtgaaattcagccgcagcgcagatgctccagcctacaagcaggggcagaaccagctctacaacgaactcaatcttggtcggagagaggagtacgacgtgctggacaagcggagaggacgggacccagaaatgggcgggaagccgcgcagaaagaatccccaagagggcctgtacaacgagctccaaaaggataagatggcagaagcctatagcgagattggtatgaaaggggaacgcagaagaggcaaaggccacgacggactgtaccagggactcagcaccgccaccaaggacacctatgacgctcttcacatgcaggccctgccgcctcgg

SEQ ID NO: 96 - DNA, 1458 bp, synthetic construct
  misc_feature 1..1458: note = source = /note="Description of Artificial Sequence: Synthetic polynucleotide"
  source 1..1458: mol_type = other DNA
atggccctccctgtcaccgccctgctgcttccgctggctcttctgctccacgccgctcggcccgaaattgtgatgacccagtcacccgccactcttagcctttcacccggtgagcgcgcaaccctgtcttgcagagcctcccaagacatctcaaaataccttaattggtatcaacagaagcccggacaggctcctcgccttctgatctaccacaccagccggctccattctggaatccctgccaggttcagcggtagcggatctgggaccgactacaccctcactatcagctcactgcagccagaggacttcgctgtctatttctgtcagcaagggaacaccctgccctacacctttggacagggcaccaagctcgagattaaaggtggaggtggcagcggaggaggtgggtccggcggtggaggaagccaggtccaactccaagaaagcggaccgggtcttgtgaagccatcagaaactctttcactgacttgtactgtgagcggagtgtctctccccgattacggggtgtcttggatcagacagccaccggggaagggtctggaatggattggagtgatttggggctctgagactacttactacaactcatccctcaagtcacgcgtcaccatctcaaaggacaactctaagaatcaggtgtcactgaaactgtcatctgtgaccgcagccgacaccgccgtgtactattgcgctaagcattactattatggcgggagctacgcaatggattactggggacagggtactctggtcaccgtgtccagcaccactaccccagcaccgaggccacccaccccggctcctaccatcgcctcccagcctctgtccctgcgtccggaggcatgtagacccgcagctggtggggccgtgcatacccggggtcttgacttcgcctgcgatatctacatttgggcccctctggctggtacttgcggggtcctgctgctttcactcgtgatcactctttactgtaagcgcggtcggaagaagctgctgtacatctttaagcaacccttcatgaggcctgtgcagactactcaagaggaggacggctgttcatgccggttcccagaggaggaggaaggcggctgcgaactgcgcgtgaaattcagccgcagcgcagatgctccagcctacaagcaggggcagaaccagctctacaacgaactcaatcttggtcggagagaggagtacgacgtgctggacaagcggagaggacgggacccagaaatgggcgggaagccgcgcagaaagaatccccaagagggcctgtacaacgagctccaaaaggataagatggcagaagcctatagcgagattggtatgaaaggggaacgcagaagaggcaaaggccacgacggactgtaccagggactcagcaccgccaccaaggacacctatgacgctcttcacatgcaggccctgccgcctcgg

SEQ ID NO: 97 - DNA, 813 bp, synthetic construct
  misc_feature 1..813: note = source = /note="Description of Artificial Sequence: Synthetic polynucleotide"
  source 1..813: mol_type = other DNA
atggccctgcccgtcaccgctctgctgctgccccttgctctgcttcttcatgcagcaaggccggacatccagatgacccaaaccacctcatccctctctgcctctcttggagacagggtgaccatttcttgtcgcgccagccaggacatcagcaagtatctgaactggtatcagcagaagccggacggaaccgtgaagctcctgatctaccatacctctcgcctgcatagcggcgtgccctcacgcttctctggaagcggatcaggaaccgattattctctcactatttcaaatcttgagcaggaagatattgccacctatttctgccagcagggtaataccctgccctacaccttcggaggagggaccaagctcgaaatcaccggtggaggaggcagcggcggtggagggtctggtggaggtggttctgaggtgaagctgcaagaatcaggccctggacttgtggccccttcacagtccctgagcgtgacttgcaccgtgtccggagtctccctgcccgactacggagtgtcatggatcagacaacctccacggaaaggactggaatggctcggtgtcatctggggtagcgaaactacttactacaattcagccctcaaaagcaggctgactattatcaaggacaacagcaagtcccaagtctttcttaagatgaactcactccagactgacgacaccgcaatctactattgtgctaagcactactactacggaggatcctacgctatggattactggggacaaggtacttccgtcactgtctcttcacaccatcatcaccatcaccatcac

SEQ ID NO: 98 - protein, 271 aa, synthetic construct
  REGION 1..271: note = source = /note="Description of Artificial Sequence: Synthetic polypeptide"
MALPVTALLLPLALLLHAARPDIQMTQTTSSLSASLGDRVTISCRASQDISKYLNWYQQKPDGTVKLLIYHTSRLHSGVPSRFSGSGSGTDYSLTISNLEQEDIATYFCQQGNTLPYTFGGGTKLEITGGGGSGGGGSGGGGSEVKLQESGPGLVAPSQSLSVTCTVSGVSLPDYGVSWIRQPPRKGLEWLGVIWGSETTYYNSALKSRLTIIKDNSKSQVFLKMNSLQTDDTAIYYCAKHYYYGGSYAMDYWGQGTSVTVSSHHHHHHHH

SEQ ID NO: 99 - DNA, 1458 bp, synthetic construct
  misc_feature 1..1458: note = source = /note="Description of Artificial Sequence: Synthetic polynucleotide"
  source 1..1458: mol_type = other DNA
atggccttaccagtgaccgccttgctcctgccgctggccttgctgctccacgccgccaggccggacatccagatgacacagactacatcctccctgtctgcctctctgggagacagagtcaccatcagttgcagggcaagtcaggacattagtaaatatttaaattggtatcagcagaaaccagatggaactgttaaactcctgatctaccatacatcaagattacactcaggagtcccatcaaggttcagtggcagtgggtctggaacagattattctctcaccattagcaacctggagcaagaagatattgccacttacttttgccaacagggtaatacgcttccgtacacgttcggaggggggaccaagctggagatcacaggtggcggtggctcgggcggtggtgggtcgggtggcggcggatctgaggtgaaactgcaggagtcaggacctggcctggtggcgccctcacagagcctgtccgtcacatgcactgtctcaggggtctcattacccgactatggtgtaagctggattcgccagcctccacgaaagggtctggagtggctgggagtaatatggggtagtgaaaccacatactataattcagctctcaaatccagactgaccatcatcaaggacaactccaagagccaagttttcttaaaaatgaacagtctgcaaactgatgacacagccatttactactgtgccaaacattattactacggtggtagctatgctatggactactggggccaaggaacctcagtcaccgtctcctcaaccacgacgccagcgccgcgaccaccaacaccggcgcccaccatcgcgtcgcagcccctgtccctgcgcccagaggcgtgccggccagcggcggggggcgcagtgcacacgagggggctggacttcgcctgtgatatctacatctgggcgcccttggccgggacttgtggggtccttctcctgtcactggttatcaccctttactgcaaacggggcagaaagaaactcctgtatatattcaaacaaccatttatgagaccagtacaaactactcaagaggaagatggctgtagctgccgatttccagaagaagaagaaggaggatgtgaactgagagtgaagttcagcaggagcgcagacgcccccgcgtacaagcagggccagaaccagctctataacgagctcaatctaggacgaagagaggagtacgatgttttggacaagagacgtggccgggaccctgagatggggggaaagccgagaaggaagaaccctcaggaaggcctgtacaatgaactgcagaaagataagatggcggaggcctacagtgagattgggatgaaaggcgagcgccggaggggcaaggggcacgatggcctttaccagggtctcagtacagccaccaaggacacctacgacgcccttcacatgcaggccctgccccctcgc

SEQ ID NO: 100 - DNA, 1184 bp, synthetic construct
  misc_feature 1..1184: note = source = /note="Description of Artificial Sequence: Synthetic polynucleotide"
  source 1..1184: mol_type = other DNA
cgtgaggctccggtgcccgtcagtgggcagagcgcacatcgcccacagtccccgagaagttggggggaggggtcggcaattgaaccggtgcctagagaaggtggcgcggggtaaactgggaaagtgatgtcgtgtactggctccgcctttttcccgagggtgggggagaaccgtatataagtgcagtagtcgccgtgaacgttctttttcgcaacgggtttgccgccagaacacaggtaagtgccgtgtgtggttcccgcgggcctggcctctttacgggttatggcccttgcgtgccttgaattacttccacctggctgcagtacgtgattcttgatcccgagcttcgggttggaagtgggtgggagagttcgaggccttgcgcttaaggagccccttcgcctcgtgcttgagttgaggcctggcctgggcgctggggccgccgcgtgcgaatctggtggcaccttcgcgcctgtctcgctgctttcgataagtctctagccatttaaaatttttgatgacctgctgcgacgctttttttctggcaagatagtcttgtaaatgcgggccaagatctgcacactggtatttcggtttttggggccgcgggcggcgacggggcccgtgcgtcccagcgcacatgttcggcgaggcggggcctgcgagcgcggccaccgagaatcggacgggggtagtctcaagctggccggcctgctctggtgcctggcctcgcgccgccgtgtatcgccccgccctgggcggcaaggctggcccggtcggcaccagttgcgtgagcggaaagatggccgcttcccggccctgctgcagggagctcaaaatggaggacgcggcgctcgggagagcgggcgggtgagtcacccacacaaaggaaaagggcctttccgtcctcagccgtcgcttcatgtgactccacggagtaccgggcgccgtccaggcacctcgattagttctcgagcttttggagtacgtcgtctttaggttggggggaggggttttatgcgatggagtttccccacactgagtgggtggagactgaagttaggccagcttggcacttgatgtaattctccttggaatttgccctttttgagtttggatcttggttcattctcaagcctcagacagtggttcaaagtttttttcttccatttcaggtgtcgtga

SEQ ID NO: 101 - DNA, 336 bp, synthetic construct
  misc_feature 1..336: note = source = /note="Description of Artificial Sequence: Synthetic polynucleotide"
  source 1..336: mol_type = other DNA
agagtgaagttcagcaggagcgcagacgcccccgcgtacaagcagggccagaaccagctctataacgagctcaatctaggacgaagagaggagtacgatgttttggacaagagacgtggccgggaccctgagatggggggaaagccgagaaggaagaaccctcaggaaggcctgtacaatgaactgcagaaagataagatggcggaggcctacagtgagattgggatgaaaggcgagcgccggaggggcaaggggcacgatggcctttaccagggtctcagtacagccaccaaggacacctacgacgcccttcacatgcaggccctgccccctcgc

SEQ ID NO: 102 - protein, 230 aa, synthetic construct; identical to SEQ ID NO: 45
  REGION 1..230: note = source = /note="Description of Artificial Sequence: Synthetic polypeptide"

SEQ ID NO: 103 - DNA, 690 bp, synthetic construct; identical to SEQ ID NO: 46
  misc_feature 1..690: note = source = /note="Description of Artificial Sequence: Synthetic polynucleotide"
  source 1..690: mol_type = other DNA

SEQ ID NO: 104 - DNA, 400 bp, synthetic construct
  misc_feature 1..400: note = /note="This sequence may encompass 100-400 nucleotides"
  misc_feature 1..400: note = source = /note="Description of Artificial Sequence: Synthetic polynucleotide"
  misc_feature 1..400: note = source = /note="See specification as filed for detailed description of substitutions and preferred embodiments"
  source 1..400: mol_type = other DNA
aaaaaaaaaaaaaaaaaaaaaaaaaaaaaaaaaaaaaaaaaaaaaaaaaaaaaaaaaaaaaaaaaaaaaaaaaaaaaaaaaaaaaaaaaaaaaaaaaaaaaaaaaaaaaaaaaaaaaaaaaaaaaaaaaaaaaaaaaaaaaaaaaaaaaaaaaaaaaaaaaaaaaaaaaaaaaaaaaaaaaaaaaaaaaaaaaaaaaaaaaaaaaaaaaaaaaaaaaaaaaaaaaaaaaaaaaaaaaaaaaaaaaaaaaaaaaaaaaaaaaaaaaaaaaaaaaaaaaaaaaaaaaaaaaaaaaaaaaaaaaaaaaaaaaaaaaaaaaaaaaaaaaaaaaaaaaaaaaaaaaaaaaaaaaaaaaaaaaaaaaaaaaaaaaaaaaaaaaaaaaaaaaaaaaaaaaaaaaaaa

SEQ ID NO: 105 - protein, 40 aa, synthetic construct
  REGION 1..40: note = MISC_FEATURE - /note="This sequence may encompass 1-10 'Gly-Gly-Gly-Ser' repeating units"
  REGION 1..40: note = source = /note="Description of Artificial Sequence: Synthetic polypeptide"
  REGION 1..40: note = source = /note="See specification as filed for detailed description of substitutions and preferred embodiments"
GGGSGGGSGGGSGGGSGGGSGGGSGGGSGGGSGGGSGGGS

SEQ ID NO: 106 - protein, 20 aa, synthetic construct
  REGION 1..20: note = source = /note="Description of Artificial Sequence: Synthetic peptide"
GGGGSGGGGSGGGGSGGGGS

SEQ ID NO: 107 - protein, 15 aa, synthetic construct
  REGION 1..15: note = source = /note="Description of Artificial Sequence: Synthetic peptide"
GGGGSGGGGSGGGGS

SEQ ID NO: 108 - protein, 4 aa, synthetic construct
  REGION 1..4: note = source = /note="Description of Artificial Sequence: Synthetic peptide"
GGGS

SEQ ID NO: 109 - protein, 244 aa, synthetic construct
  REGION 1..244: note = source = /note="Description of Artificial Sequence: Synthetic polypeptide"
QVQLLESGAELVRPGSSVKISCKASGYAFSSYWMNWVKQRPGQGLEWIGQIYPGDGDTNYNGKFKGQATLTADKSSSTAYMQLSGLTSEDSAVYSCARKTISSVVDFYFDYWGQGTTVTGGGSGGGSGGGSGGGSELVLTQSPKFMSTSVGDRVSVTCKASQNVGTNVAWYQQKPGQSPKPLIYSATYRNSGVPDRFTGSGSGTDFTLTITNVQSKDLADYFCQYNRYPYTSFFFTKLEIKRRS

SEQ ID NO: 110 - protein, 464 aa, synthetic construct
  REGION 1..464: note = source = /note="Description of Artificial Sequence: Synthetic polypeptide"
QVQLLESGAELVRPGSSVKISCKASGYAFSSYWMNWVKQRPGQGLEWIGQIYPGDGDTNYNGKFKGQATLTADKSSSTAYMQLSGLTSEDSAVYSCARKTISSVVDFYFDYWGQGTTVTGGGSGGGSGGGSGGGSELVLTQSPKFMSTSVGDRVSVTCKASQNVGTNVAWYQQKPGQSPKPLIYSATYRNSGVPDRFTGSGSGTDFTLTITNVQSKDLADYFCQYNRYPYTSFFFTKLEIKRRSKIEVMYPPPYLDNEKSNGTIIHVKGKHLCPSPLFPGPSKPFWVLVVVGGVLACYSLLVTVAFIIFWVRSKRSRLLHSDYMNMTPRRPGPTRKHYQPYAPPRDFAAYRSRVKFSRSADAPAYQQGQNQLYNELNLGRREEYDVLDKRRGRDPEMGGKPRRKNPQEGLYNELQKDKMAEAYSEIGMKGERRRGKGHDGLYQGLSTATKDTYDALHMQALPPR

SEQ ID NO: 111 - protein, 246 aa, synthetic construct
  REGION 1..246: note = source = /note="Description of Artificial Sequence: Synthetic polypeptide"
DIQMTQTTSSLSASLGDRVTISCRASQDISKYLNWYQQKPDGTVKLLIYHTSRLHSGVPSRFSGSGSGTDYSLTISNLEQEDIATYFCQQGNTLPYTFGGGTKLEITGSTSGSGKPGSGEGSTKGEVKLQESGPGLVAPSQSLSVTCTVSGVSLPDYGVSWIRQPPRKGLEWLGVIWGSETTYYNSALKSRLTIIKDNSKSQVFLKMNSLQTDDTAIYYCAKHYYYGGSYAMDYWGQGTSVTVSSE

SEQ ID NO: 112 - protein, 439 aa, synthetic construct
  REGION 1..439: note = source = /note="Description of Artificial Sequence: Synthetic polypeptide"
DIQMTQTTSSLSASLGDRVTISCRASQDISKYLNWYQQKPDGTVKLLIYHTSRLHSGVPSRFSGSGSGTDYSLTISNLEQEDIATYFCQQGNTLPYTFGGGTKLEITGSTSGSGKPGSGEGSTKGEVKLQESGPGLVAPSQSLSVTCTVSGVSLPDYGVSWIRQPPRKGLEWLGVIWGSETTYYNSALKSRLTIIKDNSKSQVFLKMNSLQTDDTAIYYCAKHYYYGGSYAMDYWGQGTSVTVSSESKYGPPCPPCPMFWVLVVVGGVLACYSLLVTVAFIIFWVKRGRKKLLYIFKQPFMRPVQTTQEEDGCSCRFEEEEGGCELRVKFSRSADAPAYQQGQNQLYNELNLGRREEYDVLDKRRGRDPEMGGKPRRKNPQEGLYNELQKDKMAEAYSEIGMKGERRRGKGHDGLYQGLSTATKDTYDALHMQALPPRL

SEQ ID NO: 113 - protein, 819 aa, synthetic construct
  REGION 1..819: note = source = /note="Description of Artificial Sequence: Synthetic polypeptide"
DIQMTQTTSSLSASLGDRVTISCRASQDISKYLNWYQQKPDGTVKLLIYHTSRLHSGVPSRFSGSGSGTDYSLTISNLEQEDIATYFCQQGNTLPYTFGGGTKLEITGSTSGSGKPGSGEGSTKGEVKLQESGPGLVAPSQSLSVTCTVSGVSLPDYGVSWIRQPPRKGLEWLGVIWGSETTYYNSALKSRLTIIKDNSKSQVFLKMNSLQTDDTAIYYCAKHYYYGGSYAMDYWGQGTSVTVSSESKYGPPCPPCPMFWVLVVVGGVLACYSLLVTVAFIIFWVKRGRKKLLYIFKQPFMRPVQTTQEEDGCSCRFEEEEGGCELRVKFSRSADAPAYQQGQNQLYNELNLGRREEYDVLDKRRGRDPEMGGKPRRKNPQEGLYNELQKDKMAEAYSEIGMKGERRRGKGHDGLYQGLSTATKDTYDALHMQALPPRLEGGGEGRGSLLTCGDVEENPGPRMLLLVTSLLLCELPHPAFLLIPRKVCNGIGIGEFKDSLSINATNIKHFKNCTSISGDLHILPVAFRGDSFTHTPPLDPQELDILKTVKEITGFLLIQAWPENRTDLHAFENLEIIRGRTKQHGQFSLAVVSLNITSLGLRSLKEISDGDVIISGNKNLCYANTINWKKLFGTSGQKTKIISNRGENSCKATGQVCHALCSPEGCWGPEPRDCVSCRNVSRGRECVDKCNLLEGEPREFVENSECIQCHPECLPQAMNITCTGRGPDNCIQCAHYIDGPHCVKTCPAGVMGENNTLVWKYADAGHVCHLCHPNCTYGCTGPGLEGCPTNGPKIPSIATGMVGALLLLLVVALGIGLFM

SEQ ID NO: 114 - protein, 245 aa, synthetic construct
  REGION 1..245: note = source = /note="Description of Artificial Sequence: Synthetic polypeptide"
DIQMTQTTSSLSASLGDRVTISCRASQDISKYLNWYQQKPDGTVKLLIYHTSRLHSGVPSRFSGSGSGTDYSLTISNLEQEDIATYFCQQGNTLPYTFGGGTKLEITGSTSGSGKPGSGEGSTKGEVKLQESGPGLVAPSQSLSVTCTVSGVSLPDYGVSWIRQPPRKGLEWLGVIWGSETTYYNSALKSRLTIIKDNSKSQVFLKMNSLQTDDTAIYYCAKHYYYGGSYAMDYWGQGTSVTVSS

SEQ ID NO: 115 - protein, 467 aa, synthetic construct
  REGION 1..467: note = source = /note="Description of Artificial Sequence: Synthetic polypeptide"
DIQMTQTTSSLSASLGDRVTISCRASQDISKYLNWYQQKPDGTVKLLIYHTSRLHSGVPSRFSGSGSGTDYSLTISNLEQEDIATYFCQQGNTLPYTFGGGTKLEITGSTSGSGKPGSGEGSTKGEVKLQESGPGLVAPSQSLSVTCTVSGVSLPDYGVSWIRQPPRKGLEWLGVIWGSETTYYNSALKSRLTIIKDNSKSQVFLKMNSLQTDDTAIYYCAKHYYYGGSYAMDYWGQGTSVTVSSAAAIEVMYPPPYLDNEKSNGTIIHVKGKHLCPSPLFPGPSKPFWVLVVVGGVLACYSLLVTVAFIIFWVRSKRSRLLHSDYMNMTPRRPGPTRKHYQPYAPPRDFAAYRSRVKFSRSADAPAYQQGQNQLYNELNLGRREEYDVLDKRRGRDPEMGGKPRRKNPQEGLYNELQKDKMAEAYSEIGMKGERRRGKGHDGLYQGLSTATKDTYDALHMQALPPR

SEQ ID NO: 116 - DNA, 735 bp, synthetic construct
  misc_feature 1..735: note = source = /note="Description of Artificial Sequence: Synthetic polynucleotide"
  source 1..735: mol_type = other DNA
gaagtgcaacttgtggaatctggtggaggacttgtgcaacctggaagatcactgagactgtcatgtgcagcctcggggtttaccttcgacgactacgccatgcactgggtgcgccaggctccggggaagggcctcgaatgggtgtcgggcatcagctggaactccggttccattggctatgcggactccgtgaaaggacgcttcacaatttcccgggataacgccaagaacagcctgtacttgcagatgaactccctgcgggccgaggataccgccctgtactactgcgctaaggacaagggcggtggatactacgacttctggagcggaagcgactactggggacagggaactctggtcaccgtgtcctccggcggagggggctccggcggcggtggtagcgggggtggagggtcgtcgtcggagctgacccaggaccccgcagtgtccgtcgccctggggcagactgtgcggatcacttgccaaggagacagcctgcggtcctactacgcgtcctggtatcagcagaagccggggcaggccccagtcctcgtcatctacggaaagaacaataggcccagcggaatccctgaccgcttctcgggctcatcctccggcaacaccgcctccctgaccatcacgggcgcgcaggccgaggacgaagccgattactactgcaactcacgggattccagcggatgggtgttcggaggaggaaccaagctcactgtgctc

SEQ ID NO: 117 - DNA, 744 bp, synthetic construct
  misc_feature 1..744: note = source = /note="Description of Artificial Sequence: Synthetic polynucleotide"
  source 1..744: mol_type = other DNA
caagtccaactcgtccagtccggtgcagaagtcaagaaacccggagcttccgtgaaagtgtcctgcaaggcctcggggtataccttcacttcctactacatgcactgggtccggcaggcgccgggacagggactggaatggatgggtatcatcaacccctcgggcggttccactagctacgcccagaagttccagggaagagtgaccatgacccgggacacttccacttcgaccgtgtacatggaactgagcagcctgaggagcgaggacaccgccgtgtactactgtgcccggcccgagggagtgtcctactacgattcctccgtgctggattactggggacagggaacacttgtgaccgtgtcctcgggaggaggcggaagcgggggcggagggtctgggggaggcggctcccagtccgctctgacgcagcctgcgtccgtgtccgggagccctggccagagcattactatttcatgcaccggtaccagctccgacgtgggcggatataagcacgtgtcatggtaccagcatcacccgggaaaggccccaaagctgatgatctacgacgtgtcgaacagaccgagcggggtgtcaaatcgcttttccggttcaaagtcgggcaacactgcctcactcaccgtgtcgggcctccaagcggaggacgaagcccactactactgcgtgtcctaccgcaacttcaactccttggtgttcggcaccggcaccaaggtcaccgtcctg

SEQ ID NO: 118 - DNA, 2000 bp, synthetic construct
  misc_feature 1..2000: note = /note="This sequence may encompass 50-2000 nucleotides"
  misc_feature 1..2000: note = source = /note="Description of Artificial Sequence: Synthetic polynucleotide"
  misc_feature 1..2000: note = source = /note="See specification as filed for detailed description of substitutions and preferred embodiments"
  source 1..2000: mol_type = other DNA
aaaaaaaaaaaaaaaaaaaaaaaaaaaaaaaaaaaaaaaaaaaaaaaaaaaaaaaaaaaaaaaaaaaaaaaaaaaaaaaaaaaaaaaaaaaaaaaaaaaaaaaaaaaaaaaaaaaaaaaaaaaaaaaaaaaaaaaaaaaaaaaaaaaaaaaaaaaaaaaaaaaaaaaaaaaaaaaaaaaaaaaaaaaaaaaaaaaaaaaaaaaaaaaaaaaaaaaaaaaaaaaaaaaaaaaaaaaaaaaaaaaaaaaaaaaaaaaaaaaaaaaaaaaaaaaaaaaaaaaaaaaaaaaaaaaaaaaaaaaaaaaaaaaaaaaaaaaaaaaaaaaaaaaaaaaaaaaaaaaaaaaaaaaaaaaaaaaaaaaaaaaaaaaaaaaaaaaaaaaaaaaaaaaaaaaaaaaaaaaaaaaaaaaaaaaaaaaaaaaaaaaaaaaaaaaaaaaaaaaaaaaaaaaaaaaaaaaaaaaaaaaaaaaaaaaaaaaaaaaaaaaaaaaaaaaaaaaaaaaaaaaaaaaaaaaaaaaaaaaaaaaaaaaaaaaaaaaaaaaaaaaaaaaaaaaaaaaaaaaaaaaaaaaaaaaaaaaaaaaaaaaaaaaaaaaaaaaaaaaaaaaaaaaaaaaaaaaaaaaaaaaaaaaaaaaaaaaaaaaaaaaaaaaaaaaaaaaaaaaaaaaaaaaaaaaaaaaaaaaaaaaaaaaaaaaaaaaaaaaaaaaaaaaaaaaaaaaaaaaaaaaaaaaaaaaaaaaaaaaaaaaaaaaaaaaaaaaaaaaaaaaaaaaaaaaaaaaaaaaaaaaaaaaaaaaaaaaaaaaaaaaaaaaaaaaaaaaaaaaaaaaaaaaaaaaaaaaaaaaaaaaaaaaaaaaaaaaaaaaaaaaaaaaaaaaaaaaaaaaaaaaaaaaaaaaaaaaaaaaaaaaaaaaaaaaaaaaaaaaaaaaaaaaaaaaaaaaaaaaaaaaaaaaaaaaaaaaaaaaaaaaaaaaaaaaaaaaaaaaaaaaaaaaaaaaaaaaaaaaaaaaaaaaaaaaaaaaaaaaaaaaaaaaaaaaaaaaaaaaaaaaaaaaaaaaaaaaaaaaaaaaaaaaaaaaaaaaaaaaaaaaaaaaaaaaaaaaaaaaaaaaaaaaaaaaaaaaaaaaaaaaaaaaaaaaaaaaaaaaaaaaaaaaaaaaaaaaaaaaaaaaaaaaaaaaaaaaaaaaaaaaaaaaaaaaaaaaaaaaaaaaaaaaaaaaaaaaaaaaaaaaaaaaaaaaaaaaaaaaaaaaaaaaaaaaaaaaaaaaaaaaaaaaaaaaaaaaaaaaaaaaaaaaaaaaaaaaaaaaaaaaaaaaaaaaaaaaaaaaaaaaaaaaaaaaaaaaaaaaaaaaaaaaaaaaaaaaaaaaaaaaaaaaaaaaaaaaaaaaaaaaaaaaaaaaaaaaaaaaaaaaaaaaaaaaaaaaaaaaaaaaaaaaaaaaaaaaaaaaaaaaaaaaaaaaaaaaaaaaaaaaaaaaaaaaaaaaaaaaaaaaaaaaaaaaaaaaaaaaaaaaaaaaaaaaaaaaaaaaaaaaaaaaaaaaaaaaaaaaaaaaaaaaaaaaaaaaaaaaaaaaaaaaaaaaaaaaaaaaaaaaaaaaaaaaaaaaaaaaaaaaaaaaaaaaaaaaaaaaaaaaaaaaaaaaaaaaaaaaaaaaaaaaaaaaaaaaaaaaaaaaaaaaaaaaaaaaaaaaaaaaaaaaaaaaaaaaaaaaaaaaaaaaaaaaaaaaaaaaaaaaaaaaaaaaaaaaaaaaaaaaaaaaaaaaaaaaaaaaaaaaaaaaaaaaaaaaaaaaaaaaaaaaaaaaaaaaaaaaaaaaaaaaaaaaaaaaaaaaaaaaaaaaaaaaaaaaaaaaaaaaaaaaaaaaaaaaaaaaaaaaaaaaaaaaaaaaaaaaaaaaaaaaaaaaaaaaaaaaaaaaaaaaaaaaaaaaaaaaaaaaaaaaaaaaaaaaaaaaaaaaaaaaaaaaaaaaaaaaaaaaaaaaaaaaaaaaaaaaaaaaaaaaaaaaaaaaaaaaa

SEQ ID NO: 119 - protein, 373 aa, synthetic construct
  REGION 1..373: note = source = /note="Description of Artificial Sequence: Synthetic polypeptide"
PGWFLDSPDRPWNPPTFSPALLVVTEGDNATFTCSFSNTSESFVLNWYRMSPSNQTDKLAAFPEDRSQPGQDCRFRVTQLPNGRDFHMSVVRARRNDSGTYLCGAISLAPKAQIKESLRAELRVTERRAEVPTAHPSPSPRPAGQFQTLVTTTPAPRPPTPAPTIASQPLSLRPEACRPAAGGAVHTRGLDFACDIYIWAPLAGTCGVLLLSLVITLYCKRGRKKLLYIFKQPFMRPVQTTQEEDGCSCRFPEEEEGGCELRVKFSRSADAPAYKQGQNQLYNELNLGRREEYDVLDKRRGRDPEMGGKPRRKNPQEGLYNELQKDKMAEAYSEIGMKGERRRGKGHDGLYQGLSTATKDTYDALHMQALPPR

SEQ ID NO: 120 - DNA, 1182 bp, synthetic construct
  misc_feature 1..1182: note = source = /note="Description of Artificial Sequence: Synthetic polynucleotide"
  source 1..1182: mol_type = other DNA
atggccctccctgtcactgccctgcttctccccctcgcactcctgctccacgccgctagaccacccggatggtttctggactctccggatcgcccgtggaatcccccaaccttctcaccggcactcttggttgtgactgagggcgataatgcgaccttcacgtgctcgttctccaacacctccgaatcattcgtgctgaactggtaccgcatgagcccgtcaaaccagaccgacaagctcgccgcgtttccggaagatcggtcgcaaccgggacaggattgtcggttccgcgtgactcaactgccgaatggcagagacttccacatgagcgtggtccgcgctaggcgaaacgactccgggacctacctgtgcggagccatctcgctggcgcctaaggcccaaatcaaagagagcttgagggccgaactgagagtgaccgagcgcagagctgaggtgccaactgcacatccatccccatcgcctcggcctgcggggcagtttcagaccctggtcacgaccactccggcgccgcgcccaccgactccggccccaactatcgcgagccagcccctgtcgctgaggccggaagcatgccgccctgccgccggaggtgctgtgcatacccggggattggacttcgcatgcgacatctacatttgggctcctctcgccggaacttgtggcgtgctccttctgtccctggtcatcaccctgtactgcaagcggggtcggaaaaagcttctgtacattttcaagcagcccttcatgaggcccgtgcaaaccacccaggaggaggacggttgctcctgccggttccccgaagaggaagaaggaggttgcgagctgcgcgtgaagttctcccggagcgccgacgcccccgcctataagcagggccagaaccagctgtacaacgaactgaacctgggacggcgggaagagtacgatgtgctggacaagcggcgcggccgggaccccgaaatgggcgggaagcctagaagaaagaaccctcaggaaggcctgtataacgagctgcagaaggacaagatggccgaggcctactccgaaattgggatgaagggagagcggcggaggggaaaggggcacgacggcctgtaccaaggactgtccaccgccaccaaggacacatacgatgccctgcacatgcaggcccttccccctcgc

SEQ ID NO: 121 - protein, 394 aa, synthetic construct
  REGION 1..394: note = source = /note="Description of Artificial Sequence: Synthetic polypeptide"
MALPVTALLLPLALLLHAARPPGWFLDSPDRPWNPPTFSPALLVVTEGDNATFTCSFSNTSESFVLNWYRMSPSNQTDKLAAFPEDRSQPGQDCRFRVTQLPNGRDFHMSVVRARRNDSGTYLCGAISLAPKAQIKESLRAELRVTERRAEVPTAHPSPSPRPAGQFQTLVTTTPAPRPPTPAPTIASQPLSLRPEACRPAAGGAVHTRGLDFACDIYIWAPLAGTCGVLLLSLVITLYCKRGRKKLLYIFKQPFMRPVQTTQEEDGCSCRFPEEEEGGCELRVKFSRSADAPAYKQGQNQLYNELNLGRREEYDVLDKRRGRDPEMGGKPRRKNPQEGLYNELQKDKMAEAYSEIGMKGERRRGKGHDGLYQGLSTATKDTYDALHMQALPPR

SEQ ID NO: 122 - protein, 132 aa, synthetic construct
  REGION 1..132: note = source = /note="Description of Artificial Sequence: Synthetic polypeptide"
DVPDYASLGGPSSPKKKRKVSRGVQVETISPGDGRTFPKRGQTCVVHYTGMLEDGKKFDSSRDRNKPFKFMLGKQEVIRGWEEGVAQMSVGQRAKLTISPDYAYGATGHPGIIPPHATLVFDVELLKLETSY

SEQ ID NO: 123 - protein, 108 aa, synthetic construct
  REGION 1..108: note = source = /note="Description of Artificial Sequence: Synthetic polypeptide"
VQVETISPGDGRTFPKRGQTCVVHYTGMLEDGKKFDSSRDRNKPFKFMLGKQEVIRGWEEGVAQMSVGQRAKLTISPDYAYGATGHPGIIPPHATLVFDVELLKLETS

SEQ ID NO: 124 - protein, 93 aa, synthetic construct [sequence omitted]

SEQ ID NO: 125 - protein, 95 aa, synthetic construct
  REGION 1..95: note = source = /note="Description of Artificial Sequence: Synthetic polypeptide"
ILWHEMWHEGLIEASRLYFGERNVKGMFEVLEPLHAMMERGPQTLKETSFNQAYGRDLMEAQEWCRKYMKSGNVKDLTQAWDLYYHVFRRISKTS

SEQ ID NO: 126 - protein, 95 aa, synthetic construct
  REGION 1..95: note = source = /note="Description of Artificial Sequence: Synthetic polypeptide"
ILWHEMWHEGLLEASRLYFGERNVKGMFEVLEPLHAMMERGPQTLKETSFNQAYGRDLMEAQEWCRKYMKSGNVKDLTQAWDLYYHVFRRISKTS

SEQ ID NO: 127 - protein, 95 aa, synthetic construct
  REGION 1..95: note = source = /note="Description of Artificial Sequence: Synthetic polypeptide"
ILWHEMWHEGLEEASRLYFGERNVKGMFEVLEPLHAMMERGPQTLKETSFNQAYGRDLMEAQEWCRKYMKSGNVKDLLQAWDLYYHVFRRISKTS

SEQ ID NO: 128 - protein, 95 aa, synthetic construct
  MOD_RES 12: note = Any amino acid
  MOD_RES 78: note = Any amino acid
  REGION 1..95: note = source = /note="Description of Artificial Sequence: Synthetic polypeptide"
ILWHEMWHEGLXEASRLYFGERNVKGMFEVLEPLHAMMERGPQTLKETSFNQAYGRDLMEAQEWCRKYMKSGNVKDLXQAWDLYYHVFRRISKTS

SEQ ID NO: 129 - protein, 95 aa, synthetic construct
  REGION 1..95: note = source = /note="Description of Artificial Sequence: Synthetic polypeptide"
ILWHEMWHEGLIEASRLYFGERNVKGMFEVLEPLHAMMERGPQTLKETSFNQAYGRDLMEAQEWCRKYMKSGNVKDLLQAWDLYYHVFRRISKTS

SEQ ID NO: 130 - protein, 95 aa, synthetic construct
  REGION 1..95: note = source = /note="Description of Artificial Sequence: Synthetic polypeptide"
ILWHEMWHEGLLEASRLYFGERNVKGMFEVLEPLHAMMERGPQTLKETSFNQAYGRDLMEAQEWCRKYMKSGNVKDLLQAWDLYYHVFRRISKTS

SEQ ID NO: 131 - protein, 254 aa, Homo sapiens
EVQLQQSGPGLVKPSQTLSLTCAISGDSVSSNSAAWNWIRQSPSRGLEWLGRTYYRSKWYSDYAVSVKSRITINPDTSKNQFSLQLNSVTPEDTAVYYCARDPYDFWSGYPDAFDIWGQGTMVTVSSGGGGSGGGGSGGGGSQSALTQPASVSGSPGQSITISCTGTSSDVGGYNYVSWYQQHPGKAPKVIISEVNNRPSGVSHRFSGSKSGNTASLTISGLQAEDEADYFCSSYTSGRTLYVFGTGSKVTVLG

SEQ ID NO: 132 - protein, 251 aa, Homo sapiens
EVQLQQSGPGLVKPSQTLSLTCAISGDSVSNNNAAWNWIRQSPSRGLEWLGRTYHRSTWYNDYVGSVKSRITINPDTSKNQFSLQLNSVTPEDTAVYYCARETDYGDYGAFDIWGQGTTVTVSSGGGGSGGGGSGGGGSQSALTQPASVSGSPGQSITISCTGSRNDIGAYESVSWYQQHPGNAPKLIIHGVNNRPSGVFDRFSVSQSGNTASLTISGLQAEDEADYYCSSHTTTSTLYVFGTGTKVTVLG

SEQ ID NO: 133 - protein, 247 aa, Homo sapiens
EVQLQQSGPGLVNPSQTLSITCAISGDSVSSNSAAWNWIRQSPSRGLEWLGRTFYRSKWYNDYAVSVKGRITISPDTSKNQFSLQLNSVTPEDTAVYYCAGGDYYYGLDVWGQGTTVTVSSGGGGSGGGGSGGGGSQSALTQPASVSGSPGQSITISCTGSSSDVGGYNSVSWYQQHPGKAPKLMIYEVINRPSGVSHRFSGSKSGNTASLTISGLQAEDEADYYCSSYTSSSTYVFGTGTKVTVLG

SEQ ID NO: 134 - protein, 254 aa, Homo sapiens
EVQLQQSGPGLVKPSQTLSLTCAISGDSVLSNSDTWNWIRQSPSRGLEWLGRTYHRSTWYDDYASSVRGRVSINVDTSKNQYSLQLNAVTPEDTGVYYCARDRLQDGNSWSDAFDVWGQGTMVTVSSGGGGSGGGGSGGGGSQSALTQPASVSGSPGQSITISCTGSSSDIGGFNYVSWYQQHAGEAPKLMIYEVTNRPSGVSDRFSGSKSDNTASLTISGLQAEDEADYYCSSYASGSPLYVFGTGTKVTVLG

SEQ ID NO: 135 - protein, 254 aa, Homo sapiens
EVQLQQSGPGLVKPSQTLSLTCAISGDSVLSNSDTWNWIRQSPSRGLEWLGRTYHRSTWYDDYASSVRGRVSINVDTSKNQYSLQLNAVTPEDTGVYYCARDRLQDGNSWSDAFDVWGQGTMVTVSSGGGGSGGGGSGSGGSQSALTQPASVSGSPGQSITFSCTGTSSDIGGYNYVSWYQQHPGKAPKLMIYEVSNRPSGVSNRFSGTKSGNTASLTISGLQAEDEADYYCSSYTSSSTLYVFGTGTKLTVLG

SEQ ID NO: 136 - protein, 254 aa, Homo sapiens
QVQLQESGPGLVKPSQTLSLTCAISGDSVLSNSDTWNWIRQSPSRGLEWLGRTYHRSTWYDDYASSVRGRVSINVDTSKNQYSLQLNAVTPEDTGVYYCARDRLQDGNSWSDAFDVWGQGTMVTVSSGGGGSGGGGSGSGGSQSALTQPASVSGSPGQSITISCTGTSSDVGGYNYVSWYQQHPGKAPKLMIYEVSNRPSGVSNRFSGSKSGNTASLTISGLQAEDEADYYCSSYTSSSTLYVFGTGTKVTVLG

SEQ ID NO: 137 - protein, 254 aa, Homo sapiens
EVQLQQSGPGLVKPSQTLSLTCAISGDSVLSNSDTWNWIRQSPSRGLEWLGRTYHRSTWYDDYASSVRGRVSINVDTSKNQYSLQLNAVTPEDTGVYYCARDRLQDGNSWSDAFDVWGQGTMVTVSSGGGGSGGGGSGGGGSQSALTQPASVSGSPGQSITISCTGTSSDVGGYNYVSWYQQHPGKAPKLMIYDVSNRPSGVSNRFSGSKSGNTASLTISGLQAEDEADYYCSSYTSSSTLYVFGTGTKVTVLG

SEQ ID NO: 138 - protein, 254 aa, Homo sapiens
EVQLQQSGPGLVKPSQTLSLTCAISGDSVLSNSDTWNWIRQSPSRGLEWLGRTYHRSTWYDDYASSVRGRVSINVDTSKNQYSLQLNAVTPEDTGVYYCARDRLQDGNSWSDAFDVWGQGTMVTVSSGGGGSGGGGSGGGGSQSALTQPASVSGSPGQSITISCTGTSSDVGGYNYVSWYQQHPGKAPKLMIYEVSNRPSGVSNRFSGSKSGNTASLTISGLQAEDEADYYCSSYTSSSTLYIFGTGTKVTVLG

SEQ ID NO: 139 - protein, 253 aa, Homo sapiens
EVQLQQSGPGLVKPSQTLPLTCAISGDSVLSNSDTWNWIRQSPSRGLEWLGRTYHRSTWYDDYASSVRGRVSINVDTSKNQYSLQLNAVTPEDTGVYYCARVRLQDGNSWSDAFDVWGQGTMVTVSSGGGGSGGGGSGGGGPQSALTQPASASGSPGQSVTISCTGTSSDVGGYNYVSWYQQHPGKAPKLMIYDVSNRPSGVSNRFSGSKSGNTASLTISGLQAEDEADYYCSSYTSSSTLYVFGTGTQLTVL

SEQ ID NO: 140 - protein, 253 aa, Homo sapiens
EVQLQQSGPGLVKPSQTLSLTCAISGDSMLSNSDTWNWIRQSPSRGLEWLGRTYHRSTWYDDYASSVRGRVSINVDTSKNQYSLQLNAVTPEDTGVYYCARVRLQDGNSWSDAFDVWGQGTMVTVSSGGGGSGGGGSGGGGSQSALTQPASASGSPGQSVTISCTGTSSDVGGYNYVSWYQQHPGKAPKLMIYDVSNRPSGVSNRFSGSKSGNTASLTISGLQAEDEADYYCSSYTSSSTLYVFGTGTQLTVL

SEQ ID NO: 141 - protein, 15 aa, synthetic construct
  MOD_RES 1: note = Any amino acid
  REGION 1..15: note = source = /note="Description of Artificial Sequence: Synthetic peptide"
XRLQDGNSWSDAFDV

SEQ ID NO: 142 - protein, 12 aa, synthetic construct
  REGION 1..12: note = source = /note="Description of Artificial Sequence: Synthetic peptide"
GDSVSSNSAAWN

SEQ ID NO: 143 - protein, 10 aa, synthetic construct
  REGION 1..10: note = source = /note="Description of Artificial Sequence: Synthetic peptide"
GFTVSSNYMS

SEQ ID NO: 144 - protein, 12 aa, synthetic construct
  REGION 1..12: note = source = /note="Description of Artificial Sequence: Synthetic peptide"
GDSVSSNSAAWN

SEQ ID NO: 145 - protein, 12 aa, synthetic construct
  REGION 1..12: note = source = /note="Description of Artificial Sequence: Synthetic peptide"
GDSVLSNSDTWN

SEQ ID NO: 146 - protein, 10 aa, synthetic construct
  REGION 1..10: note = source = /note="Description of Artificial Sequence: Synthetic peptide"
GFTFDDYAMH

SEQ ID NO: 147 - protein, 10 aa, synthetic construct
  REGION 1..10: note = source = /note="Description of Artificial Sequence: Synthetic peptide"
GFTFDDYAMH

SEQ ID NO: 148 - protein, 12 aa, synthetic construct
  REGION 1..12: note = source = /note="Description of Artificial Sequence: Synthetic peptide"
GDSVSSNSATWT

SEQ ID NO: 149 - protein, 10 aa, synthetic construct
  REGION 1..10: note = source = /note="Description of Artificial Sequence: Synthetic peptide"
GYTFTGYYMH

SEQ ID NO: 150 - protein, 10 aa, synthetic construct
  REGION 1..10: note = source = /note="Description of Artificial Sequence: Synthetic peptide"
GYTFTSYGIS

SEQ ID NO: 151 - protein, 10 aa, synthetic construct
  REGION 1..10: note = source = /note="Description of Artificial Sequence: Synthetic peptide"
GFTFSNAWMN

SEQ ID NO: 152 - protein, 12 aa, synthetic construct
  REGION 1..12: note = source = /note="Description of Artificial Sequence: Synthetic peptide"
GDSVLSNSDTWN

SEQ ID NO: 153 - protein, 12 aa, synthetic construct
  REGION 1..12: note = source = /note="Description of Artificial Sequence: Synthetic peptide"
GDSVSSNSAAWN

SEQ ID NO: 154 - protein, 12 aa, synthetic construct
  REGION 1..12: note = source = /note="Description of Artificial Sequence: Synthetic peptide"
GDSVLSNSDTWN

SEQ ID NO: 155 - protein, 12 aa, synthetic construct
  REGION 1..12: note = source = /note="Description of Artificial Sequence: Synthetic peptide"
GGSISSSSYYWG

SEQ ID NO: 156 - protein, 10 aa, synthetic construct
  REGION 1..10: note = source = /note="Description of Artificial Sequence: Synthetic peptide"
GYTFTSYYMH

SEQ ID NO: 157 - protein, 10 aa, synthetic construct
  REGION 1..10: note = source = /note="Description of Artificial Sequence: Synthetic peptide"
GFTFSSYAMH

SEQ ID NO: 158 - protein, 10 aa, synthetic construct
  REGION 1..10: note = source = /note="Description of Artificial Sequence: Synthetic peptide"
GYTFTSYYMH

SEQ ID NO: 159 - protein, 10 aa, synthetic construct
  REGION 1..10: note = source = /note="Description of Artificial Sequence: Synthetic peptide"
GFTFSSYAMS

SEQ ID NO: 160 - protein, 10 aa, synthetic construct
  REGION 1..10: note = source = /note="Description of Artificial Sequence: Synthetic peptide"
GYTFTSYYMH

SEQ ID NO: 161 - protein, 10 aa, synthetic construct
  REGION 1..10: note = source = /note="Description of Artificial Sequence: Synthetic peptide"
GYTFTSYYMH

SEQ ID NO: 162 - protein, 10 aa, synthetic construct
  REGION 1..10: note = source = /note="Description of Artificial Sequence: Synthetic peptide"
GYTFTSYYMH

SEQ ID NO: 163 - protein, 10 aa, synthetic construct
  REGION 1..10: note = source = /note="Description of Artificial Sequence: Synthetic peptide"
GYTFTSYYMH

SEQ ID NO: 164 - protein, 10 aa, synthetic construct
  REGION 1..10: note = source = /note="Description of Artificial Sequence: Synthetic peptide"
GGTFSSYAIS

SEQ ID NO: 165 - protein, 10 aa, synthetic construct
  REGION 1..10: note = source = /note="Description of Artificial Sequence: Synthetic peptide"
GYTFTSYYMH

SEQ ID NO: 166 - protein, 10 aa, synthetic construct
  REGION 1..10: note = source = /note="Description of Artificial Sequence: Synthetic peptide"
GFTFSSYAMS

SEQ ID NO: 167 - protein, 10 aa, synthetic construct
  REGION 1..10: note = source = /note="Description of Artificial Sequence: Synthetic peptide"
GYTFTSYYMH

SEQ ID NO: 168 - protein, 10 aa, synthetic construct
  REGION 1..10: note = source = /note="Description of Artificial Sequence: Synthetic peptide"
GYSFTGSWIG

SEQ ID NO: 169 - protein, 10 aa, synthetic construct
  REGION 1..10: note = source = /note="Description of Artificial Sequence: Synthetic peptide"
GGSINSYYWS

SEQ ID NO: 170 - protein, 10 aa, synthetic construct
  REGION 1..10: note = source = /note="Description of Artificial Sequence: Synthetic peptide"
GFTFSDYYMS

SEQ ID NO: 171 - protein, 10 aa, synthetic construct
  REGION 1..10: note = source = /note="Description of Artificial Sequence: Synthetic peptide"
GYTFTSYYMH

SEQ ID NO: 172 - protein, 10 aa, synthetic construct
  REGION 1..10: note = source = /note="Description of Artificial Sequence: Synthetic peptide"
GYTFTGYYMH

SEQ ID NO: 173 - protein, 10 aa, synthetic construct
  REGION 1..10: note = source = /note="Description of Artificial Sequence: Synthetic peptide"
GYTFTSYDIN

SEQ ID NO: 174 - protein, 10 aa, synthetic construct
  REGION 1..10: note = source = /note="Description of Artificial Sequence: Synthetic peptide"
GYTFTSYGIS

SEQ ID NO: 175 - protein, 12 aa, synthetic construct
  REGION 1..12: note = source = /note="Description of Artificial Sequence: Synthetic peptide"
GFSLNTFGMSVS

SEQ ID NO: 176 - protein, 11 aa, synthetic construct
  REGION 1..11: note = source = /note="Description of Artificial Sequence: Synthetic peptide"
GASITSRHWWN

SEQ ID NO: 177 - protein, 10 aa, synthetic construct
  REGION 1..10: note = source = /note="Description of Artificial Sequence: Synthetic peptide"
GYTFTSYYMH

SEQ ID NO: 178 - protein, 10 aa, synthetic construct
  REGION 1..10: note = source = /note="Description of Artificial Sequence: Synthetic peptide"
GYTFTSYYMH

SEQ ID NO: 179 - protein, 10 aa, synthetic construct
  REGION 1..10: note = source = /note="Description of Artificial Sequence: Synthetic peptide"
GYTFTSYYMH

SEQ ID NO: 180 - protein, 10 aa, synthetic construct
  REGION 1..10: note = source = /note="Description of Artificial Sequence: Synthetic peptide"
GYTFTSYYMH

SEQ ID NO: 181 - protein, 18 aa, synthetic construct
  REGION 1..18: note = source = /note="Description of Artificial Sequence: Synthetic peptide"
RTYYRSKWYNDYAVSVKS

SEQ ID NO: 182 - protein, 16 aa, synthetic construct
  REGION 1..16: note = source = /note="Description of Artificial Sequence: Synthetic peptide"
VIYSGGSTYYADSVKG

SEQ ID NO: 183 - protein, 18 aa, synthetic construct
  REGION 1..18: note = source = /note="Description of Artificial Sequence: Synthetic peptide"
RTYYRSKWYNDYAVSVKS

SEQ ID NO: 184 - protein, 18 aa, synthetic construct
  REGION 1..18: note = source = /note="Description of Artificial Sequence: Synthetic peptide"
RTYHRSTWYDDYASSVRG

SEQ ID NO: 185 - protein, 17 aa, synthetic construct
  REGION 1..17: note = source = /note="Description of Artificial Sequence: Synthetic peptide"
GISWNSGSIGYADSVKG

SEQ ID NO: 186 - protein, 17 aa, synthetic construct
  REGION 1..17: note = source = /note="Description of Artificial Sequence: Synthetic peptide"
GISWNSGSIGYADSVKG

SEQ ID NO: 187 - protein, 18 aa, synthetic construct
  REGION 1..18: note = source = /note="Description of Artificial Sequence: Synthetic peptide"
RTYYRSTWYNDYAVSVKS

SEQ ID NO: 188 - protein, 17 aa, synthetic construct
  REGION 1..17: note = source = /note="Description of Artificial Sequence: Synthetic peptide"
WINPNSGGTNYAQKFQG

SEQ ID NO: 189 - protein, 17 aa, synthetic construct
  REGION 1..17: note = source = /note="Description of Artificial Sequence: Synthetic peptide"
WISAYNGNTNYAQKLQG

SEQ ID NO: 190 - protein, 19 aa, synthetic construct
  REGION 1..19: note = source = /note="Description of Artificial Sequence: Synthetic peptide"
RIKSKTDGGTADYAAPVKG

SEQ ID NO: 191 - protein, 18 aa, synthetic construct
  REGION 1..18: note = source = /note="Description of Artificial Sequence: Synthetic peptide"
RTYHRSTWYDDYASSVRG

SEQ ID NO: 192 - protein, 18 aa, synthetic construct
  REGION 1..18: note = source = /note="Description of Artificial Sequence: Synthetic peptide"
RTYYRSKWYNDYAVSVKS

SEQ ID NO: 193 - protein, 18 aa, synthetic construct
  REGION 1..18: note = source = /note="Description of Artificial Sequence: Synthetic peptide"
RTYHRSTWYDDYASSVRG

SEQ ID NO: 194 - protein, 16 aa, synthetic construct
  REGION 1..16: note = source = /note="Description of Artificial Sequence: Synthetic peptide"
SIYYSGSTYYNPSLKS

SEQ ID NO: 195 - protein, 17 aa, synthetic construct
  REGION 1..17: note = source = /note="Description of Artificial Sequence: Synthetic peptide"
IINPSGGSTSYAQKFQG

SEQ ID NO: 196 - protein, 17 aa, synthetic construct
  REGION 1..17: note = source = /note="Description of Artificial Sequence: Synthetic peptide"
AISSNGGSTYYANSVKD

SEQ ID NO: 197 - protein, 17 aa, synthetic construct
  REGION 1..17: note = source = /note="Description of Artificial Sequence: Synthetic peptide"
IINPSGGSTSYAQKFQG

SEQ ID NO: 198 - protein, 17 aa, synthetic construct
  REGION 1..17: note = source = /note="Description of Artificial Sequence: Synthetic peptide"
AISGSGGSTYYADSVKG

SEQ ID NO: 199 - protein, 17 aa, synthetic construct
  REGION 1..17: note = source = /note="Description of Artificial Sequence: Synthetic peptide"
IINPSGGSTSYAQKFQG

SEQ ID NO: 200 - DNA, 9211 bp, synthetic construct
  misc_feature 1..9211: note = source = /note="Description of Artificial Sequence: Synthetic polynucleotide"
  source 1..9211: mol_type = other DNA
gtgcacgagtgggttacatcgaactggatctcaacagcggtaagatccttgagagttttcgccccgaagaacgttttccaatgatgagcacttttaaagttctgctatgtggcgcggtattatcccgtattgacgccgggcaagagcaactcggtcgccgcatacactattctcagaatgacttggttgagtactcaccagtcacagaaaagcatcttacggatggcatgacagtaagagaattatgcagtgctgccataaccatgagtgataacactgcggccaacttacttctgacaacgatcggaggaccgaaggagctaaccgcttttttgcacaacatgggggatcatgtaactcgccttgatcgttgggaaccggagctgaatgaagccataccaaacgacgagcgtgacaccacgatgcctgtagcaatggcaacaacgttgcgcaaactattaactggcgaactacttactctagcttcccggcaacaattaatagactggatggaggcggataaagttgcaggaccacttctgcgctcggcccttccggctggctggtttattgctgataaatctggagccggtgagcgtgggtctcgcggtatcattgcagcactggggccagatggtaagccctcccgtatcgtagttatctacacgacggggagtcaggcaactatggatgaacgaaatagacagatcgctgagataggtgcctcactgattaagcattggtaactgtcagaccaagtttactcatatatactttagattgatttaaaacttcatttttaatttaaaaggatctaggtgaagatcctttttgataatctcatgaccaaaatcccttaacgtgagttttcgttccactgagcgtcagaccccgtagaaaagatcaaaggatcttcttgagatcctttttttctgcgcgtaatctgctgcttgcaaacaaaaaaaccaccgctaccagcggtggtttgtttgccggatcaagagctaccaactctttttccgaaggtaactggcttcagcagagcgcagataccaaatactgttcttctagtgtagccgtagttaggccaccacttcaagaactctgtagcaccgcctacatacctcgctctgctaatcctgttaccagtggctgctgccagtggcgataagtcgtgtcttaccgggttggactcaagacgatagttaccggataaggcgcagcggtcgggctgaacggggggttcgtgcacacagcccagcttggagcgaacgacctacaccgaactgagatacctacagcgtgagctatgagaaagcgccacgcttcccgaagggagaaaggcggacaggtatccggtaagcggcagggtcggaacaggagagcgcacgagggagcttccagggggaaacgcctggtatctttatagtcctgtcgggtttcgccacctctgacttgagcgtcgatttttgtgatgctcgtcaggggggcggagcctatggaaaaacgccagcaacgcggcctttttacggttcctggccttttgctggccttttgctcacatgttctttcctgcgttatcccctgattctgtggataaccgtattaccgcctttgagtgagctgataccgctcgccgcagccgaacgaccgagcgcagcgagtcagtgagcgaggaagcggaagagcgcccaatacgcaaaccgcctctccccgcgcgttggccgattcattaatgcagctggcacgacaggtttcccgactggaaagcgggcagtgagcgcaacgcaattaatgtgagttagctcactcattaggcaccccaggctttacactttatgcttccggctcgtatgttgtgtggaattgtgagcggataacaatttcacacaggaaacagctatgaccatgattacgccaagcgcgcaattaaccctcactaaagggaacaaaagctggagctgcaagcttaatgtagtcttatgcaatactcttgtagtcttgcaacatggtaacgatgagttagcaacatgccttacaaggagagaaaaagcaccgtgcatgccgattggtggaagtaaggtggtacgatcgtgccttattaggaaggcaacagacgggtctgacatggattggacgaaccactgaattgccgcattgcagagatattgtatttaagtgcctagctcgatacataaacgggtctctctggttagaccagatctgagcctgggagctctctggctaactagggaacccactgcttaagcctcaataaagcttgccttgagtgcttcaagtagtgtgtgcccgtctgttgtgtgactctggtaactagagatccctcagacccttttagtcagtgtggaaaatctctagcagtggcgcccgaacagggacttgaaagcgaaagggaaaccagaggagctctctcgacgcaggactcggcttgctgaagcgcgcacggcaagaggcgaggggcggcgactggtgagtacgccaaaaattttgactagcggaggctagaaggagagagatgggtgcgagagcgtcagtattaagcgggggagaattagatcgcgatgggaaaaaattcggttaaggccagggggaaagaaaaaatataaattaaaacatatagtatgggcaagcagggagctagaacgattcgcagttaatcctggcctgttagaaacatcagaaggctgtagacaaatactgggacagctacaaccatcccttcagacaggatcagaagaacttagatcattatataatacagtagcaaccctctattgtgtgcatcaaaggatagagataaaagacaccaaggaagctttagacaagatagaggaagagcaaaacaaaagtaagaccaccgcacagcaagcggccgctgatcttcagacctggaggaggagatatgagggacaattggagaagtgaattatataaatataaagtagtaaaaattgaaccattaggagtagcacccaccaaggcaaagagaagagtggtgcagagagaaaaaagagcagtgggaataggagctttgttccttgggttcttgggagcagcaggaagcactatgggcgcagcgtcaatgacgctgacggtacaggccagacaattattgtctggtatagtgcagcagcagaacaatttgctgagggctattgaggcgcaacagcatctgttgcaactcacagtctggggcatcaagcagctccaggcaagaatcctggctgtggaaagatacctaaaggatcaacagctcctggggatttggggttgctctggaaaactcatttgcaccactgctgtgccttggaatgctagttggagtaataaatctctggaacagatttggaatcacacgacctggatggagtgggacagagaaattaacaattacacaagcttaatacactccttaattgaagaatcgcaaaaccagcaagaaaagaatgaacaagaattattggaattagataaatgggcaagtttgtggaattggtttaacataacaaattggctgtggtatataaaattattcataatgatagtaggaggcttggtaggtttaagaatagtttttgctgtactttctatagtgaatagagttaggcagggatattcaccattatcgtttcagacccacctcccaaccccgaggggacccgacaggcccgaaggaatagaagaagaaggtggagagagagacagagacagatccattcgattagtgaacggatctcgacggtatcgattagactgtagcccaggaatatggcagctagattgtacacatttagaaggaaaagttatcttggtagcagttcatgtagccagtggatatatagaagcagaagtaattccagcagagacagggcaagaaacagcatacttcctcttaaaattagcaggaagatggccagtaaaaacagtacatacagacaatggcagcaatttcaccagtactacagttaaggccgcctgttggtgggcggggatcaagcaggaatttggcattccctacaatccccaaagtcaaggagtaatagaatctatgaataaagaattaaagaaaattataggacaggtaagagatcaggctgaacatcttaagacagcagtacaaatggcagtattcatccacaattttaaaagaaaaggggggattgggggggtacagtgcaggggaaagaatagtagacataatagcaacagacatacaaactaaagaattacaaaaacaaattacaaaaattcaaaattttcgggtttattacagggacagcagagatccagtttggctgcatacgcgtcgtgaggctccggtgcccgtcagtgggcagagcgcacatcgcccacagtccccgagaagttggggggaggggtcggcaattgaaccggtgcctagagaaggtggcgcggggtaaactgggaaagtgatgtcgtgtactggctccgcctttttcccgagggtgggggagaaccgtatataagtgcagtagtcgccgtgaacgttctttttcgcaacgggtttgccgccagaacacaggtaagtgccgtgtgtggttcccgcgggcctggcctctttacgggttatggcccttgcgtgccttgaattacttccacctggctgcagtacgtgattcttgatcccgagcttcgggttggaagtgggtgggagagttcgaggccttgcgcttaaggagccccttcgcctcgtgcttgagttgaggcctggcctgggcgctggggccgccgcgtgcgaatctggtggcaccttcgcgcctgtctcgctgctttcgataagtctctagccatttaaaatttttgatgacctgctgcgacgctttttttctggcaagatagtcttgtaaatgcgggccaagatctgcacactggtatttcggtttttggggccgcgggcggcgacggggcccgtgcgtcccagcgcacatgttcggcgaggcggggcctgcgagcgcggccaccgagaatcggacgggggtagtctcaagctggccggcctgctctggtgcctggcctcgcgccgccgtgtatcgccccgccctgggcggcaaggctggcccggtcggcaccagttgcgtgagcggaaagatggccgcttcccggccctgctgcagggagctcaaaatggaggacgcggcgctcgggagagcgggcgggtgagtcacccacacaaaggaaaagggcctttccgtcctcagccgtcgcttcatgtgactccactgagtaccgggcgccgtccaggcacctcgattagttctcgtgcttttggagtacgtcgtctttaggttggggggaggggttttatgcgatggagtttccccacactgagtgggtggagactgaagttaggccagcttggcacttgatgtaattctccttggaatttgccctttttgagtttggatcttggttcattctcaagcctcagacagtggttcaaagtttttttcttccatttcaggtgtcgtgagctagctctagagccaccatggccctgcctgtgacagccctgctgctgcctctggctctgctgctgcatgccgctagacccggatcccaggtgcagctgcagcagtctggacccggcctcgtgaagcctagccagaccctgtctctgacctgcgccatcagcggcgatagcgtgtccagcaatagcgccgcctggaactggatcagacagagccctagcagaggcctggaatggctgggccggacctactaccggtccaagtggtacaacgactacgccgtgtccgtgaagtcccggatcaccatcaaccccgacaccagcaagaaccagttctccctgcagctgaacagcgtgacccccgaggataccgccgtgtactactgcgccagagaagtgaccggcgacctggaagatgccttcgacatctggggccagggcacaatggtcaccgtgtctagcggaggcggaggatctggcggcggaggaagtggcggagggggatctgggggaggcggaagcgatatccagatgacccagagccccagctccctgtctgccagcgtgggcgacagagtgaccatcacctgtagggccagccagaccatctggtcctacctgaactggtatcagcagcggcctggcaaggcccccaacctgctgatctatgccgccagctctctgcagtccggcgtgcccagcagattttccggcagaggctccggcaccgacttcaccctgacaatcagttccctgcaggccgaggacttcgccacctactactgccagcagagctacagcatcccccagaccttcggccaggggaccaagctggaaatcaagtccggaaccacgacgccagcgccgcgaccaccaacaccggcgcccaccatcgcgtcgcagcccctgtccctgcgcccagaggcgtgccggccagcggcggggggcgcagtgcacacgagggggctggacttcgcctgtgatatctacatctgggcgcccttggccgggacttgtggggtccttctcctgtcactggttatcaccctttactgcaaacggggcagaaagaaactcctgtatatattcaaacaaccatttatgagaccagtacaaactactcaagaggaagatggctgtagctgccgatttccagaagaagaagaaggaggatgtgaactgagagtgaagttcagcaggagcgcagacgcccccgcgtacaagcagggccagaaccagctctataacgagctcaatctaggacgaagagaggagtacgatgttttggacaagagacgtggccgggaccctgagatggggggaaagccgagaaggaagaaccctcaggaaggcctgtacaatgaactgcagaaagataagatggcggaggcctacagtgagattgggatgaaaggcgagcgccggaggggcaaggggcacgatggcctttaccagggtctcagtacagccaccaaggacacctacgacgcccttcacatgcaggccctgccccctcgctaagtcgacaatcaacctctggattacaaaatttgtgaaagattgactggtattcttaactatgttgctccttttacgctatgtggatacgctgctttaatgcctttgtatcatgctattgcttcccgtatggctttcattttctcctccttgtataaatcctggttgctgtctctttatgaggagttgtggcccgttgtcaggcaacgtggcgtggtgtgcactgtgtttgctgacgcaacccccactggttggggcattgccaccacctgtcagctcctttccgggactttcgctttccccctccctattgccacggcggaactcatcgccgcctgccttgcccgctgctggacaggggctcggctgttgggcactgacaattccgtggtgttgtcggggaagctgacgtcctttccatggctgctcgcctgtgttgccacctggattctgcgcgggacgtccttctgctacgtcccttcggccctcaatccagcggaccttccttcccgcggcctgctgccggctctgcggcctcttccgcgtcttcgccttcgccctcagacgagtcggatctccctttgggccgcctccccgcctggaattcgagctcggtacctttaagaccaatgacttacaaggcagctgtagatcttagccactttttaaaagaaaaggggggactggaagggctaattcactcccaacgaagacaagatctgctttttgcttgtactgggtctctctggttagaccagatctgagcctgggagctctctggctaactagggaacccactgcttaagcctcaataaagcttgccttgagtgcttcaagtagtgtgtgcccgtctgttgtgtgactctggtaactagagatccctcagacccttttagtcagtgtggaaaatctctagcagtagtagttcatgtcatcttattattcagtatttataacttgcaaagaaatgaatatcagagagtgagaggaacttgtttattgcagcttataatggttacaaataaagcaatagcatcacaaatttcacaaataaagcatttttttcactgcattctagttgtggtttgtccaaactcatcaatgtatcttatcatgtctggctctagctatcccgcccctaactccgcccagttccgcccattctccgccccatggctgactaattttttttatttatgcagaggccgaggccgcctcggcctctgagctattccagaagtagtgaggaggcttttttggaggcctaggcttttgcgtcgagacgtacccaattcgccctatagtgagtcgtattacgcgcgctcactggccgtcgttttacaacgtcgtgactgggaaaaccctggcgttacccaacttaatcgccttgcagcacatccccctttcgccagctggcgtaatagcgaagaggcccgcaccgatcgcccttcccaacagttgcgcagcctgaatggcgaatgggacgcgccctgtagcggcgcattaagcgcggcgggtgtggtggttacgcgcagcgtgaccgctacacttgccagcgccctagcgcccgctcctttcgctttcttcccttcctttctcgccacgttcgccggctttccccgtcaagctctaaatcgggggctccctttagggttccgatttagtgctttacggcacctcgaccccaaaaaacttgattagggtgatggttcacgtagtgggccatcgccctgatagacggtttttcgccctttgacgttggagtccacgttctttaatagtggactcttgttccaaactggaacaacactcaaccctatctcggtctattcttttgatttataagggattttgccgatttcggcctattggttaaaaaatgagctgatttaacaaaaatttaacgcgaattttaacaaaatattaacgcttacaatttaggtggcacttttcggggaaatgtgcgcggaacccctatttgtttatttttctaaatacattcaaatatgtatccgctcatgagacaataaccctgataaatgcttcaataatattgaaaaaggaagagtatgagtattcaacatttccgtgtcgcccttattcccttttttgcggcattttgccttcctgtttttgctcacccagaaacgctggtgaaagtaaaagatgctgaagatcagttgg

SEQ ID NO: 201 - protein, 235 aa, synthetic construct
  REGION 1..235: note = source = /note="Description of Artificial Sequence: Synthetic polypeptide"
QVQLQQSGPGLVKPSQTLSLTCAISGDSVSSNSAAWNWIRQSPSRGLEWLGRTYYRSKWYNDYAVSVKSRITINPDTSKNQFSLQLNSVTPEDTAVYYCAREVTGDLEDAFDIWGQGTMVTVSSASTKGPSVFPLAPSSKSTSGGTAALGCLVKDYFPEPVTVSWNSGALTSGVHTFPAVLQSSGLYSLSSVVTVPSSSLGTQTYICNVSHKPSNTKVDKKVEPKSCDKTSGQAG

SEQ ID NO: 202 - protein, 214 aa, synthetic construct
  REGION 1..214: note = source = /note="Description of Artificial Sequence: Synthetic polypeptide"
DIQMTQSPSSLSASVGDRVTITCRASQTIWSYLNWYQQRPGKAPNLLIYAASSLQSGVPSRFSGRGSGTDFTLTISSLQAEDFATYYCQQSYSIPQTFGQGTKLEIKRTVAAPSVFIFPPSDEQLKSGTASVVCLLNNFYPREAKVQWKVDNALQSGNSQESVTEQDSKDSTYSLSSTLTLSKADYEKHKVYACEVTHQGLSSPVTKSFNRGEC

SEQ ID NO: 203 - protein, 251 aa, synthetic construct
  REGION 1..251: note = source = /note="Description of Artificial Sequence: Synthetic polypeptide"
QVQLVQSGGGLIQPGGSLRLSCAASGFTVSSNYMSWVRQAPGKGLEWVSVIYSGGSTYYADSVKGRFTISRDNSKNTLYLQMNSLRAEDTAVYYCASQSTPYDSSGYYSGDAFDIWGQGTMVTVSSGGGGSGGGGSGGGGSSYVLTQPPSASGTPGQRVTISCSGSSSNIGSNYVYWYQQLPGTAPKLLIYRNNQRPSGVPDRFSGSKSGTSASLAISGLRSEDEADYYCAAWDDSLSGYVFGTGTKLTVL

SEQ ID NO: 204 - DNA, 753 bp, synthetic construct
  misc_feature 1..753: note = source = /note="Description of Artificial Sequence: Synthetic polynucleotide"
  source 1..753: mol_type = other DNA
caagtgcaactcgtccaatccggcggcggactgattcaaccaggaggttcccttagactctcatgtgccgctagcggattcactgtgtcctcaaactacatgagctgggtccgccaggcgcccggaaagggcctggaatgggtgtccgtgatctactcgggcggatcaacctactacgccgattccgtgaaggggcggttcaccatctcgcgggataactccaagaacaccctgtacttgcaaatgaactcactgagggccgaagataccgccgtctactactgcgcgagccagtccactccctacgactcgagcgggtactactccggggacgccttcgacatctggggacagggaactatggtcacggtgtcgtcgggaggagggggcagcggcggcggaggaagcgggggagggggttcgtcctatgtgctgacccagccgccgagcgcctccgggactccgggccagcgcgtgaccatttcctgctccggctcctcatccaacatcggttcgaattatgtgtactggtaccagcagctgcctggtactgcccctaagcttctcatctaccggaacaaccagcgcccgtctggcgtgcccgaccggttctccggctcgaagtccggcaccagcgcctccctggctatctccgggctgagatccgaggatgaggccgactactattgcgcagcgtgggacgacagcctgtcgggatacgtgtttggaaccggaaccaagctcaccgtgctg

SEQ ID NO: 205 - DNA, 846 bp, synthetic construct
  misc_feature 1..846: note = source = /note="Description of Artificial Sequence: Synthetic polynucleotide"
  source 1..846: mol_type = other DNA
atggccctccctgtcaccgccctgctgcttccgctggctcttctgctccacgccgctcggccccaagtgcaactcgtccaatccggcggcggactgattcaaccaggaggttcccttagactctcatgtgccgctagcggattcactgtgtcctcaaactacatgagctgggtccgccaggcgcccggaaagggcctggaatgggtgtccgtgatctactcgggcggatcaacctactacgccgattccgtgaaggggcggttcaccatctcgcgggataactccaagaacaccctgtacttgcaaatgaactcactgagggccgaagataccgccgtctactactgcgcgagccagtccactccctacgactcgagcgggtactactccggggacgccttcgacatctggggacagggaactatggtcacggtgtcgtcgggaggagggggcagcggcggcggaggaagcgggggagggggttcgtcctatgtgctgacccagccgccgagcgcctccgggactccgggccagcgcgtgaccatttcctgctccggctcctcatccaacatcggttcgaattatgtgtactggtaccagcagctgcctggtactgcccctaagcttctcatctaccggaacaaccagcgcccgtctggcgtgcccgaccggttctccggctcgaagtccggcaccagcgcctccctggctatctccgggctgagatccgaggatgaggccgactactattgcgcagcgtgggacgacagcctgtcgggatacgtgtttggaaccggaaccaagctcaccgtgctgggatcgcaccaccatcaccatcatcatcac

SEQ ID NO: 206 - protein, 282 aa, synthetic construct
  REGION 1..282: note = source = /note="Description of Artificial Sequence: Synthetic polypeptide"
MALPVTALLLPLALLLHAARPQVQLVQSGGGLIQPGGSLRLSCAASGFTVSSNYMSWVRQAPGKGLEWVSVIYSGGSTYYADSVKGRFTISRDNSKNTLYLQMNSLRAEDTAVYYCASQSTPYDSSGYYSGDAFDIWGQGTMVTVSSGGGGSGGGGSGGGGSSYVLTQPPSASGTPGQRVTISCSGSSSNIGSNYVYWYQQLPGTAPKLLIYRNNQRPSGVPDRFSGSKSGTSASLAISGLRSEDEADYYCAAWDDSLSGYVFGTGTKLTVLGSHHHHHHHH

SEQ ID NO: 207 - protein, 495 aa, synthetic construct
  REGION 1..495: note = source = /note="Description of Artificial Sequence: Synthetic polypeptide"
MALPVTALLLPLALLLHAARPQVQLVQSGGGLIQPGGSLRLSCAASGFTVSSNYMSWVRQAPGKGLEWVSVIYSGGSTYYADSVKGRFTISRDNSKNTLYLQMNSLRAEDTAVYYCASQSTPYDSSGYYSGDAFDIWGQGTMVTVSSGGGGSGGGGSGGGGSSYVLTQPPSASGTPGQRVTISCSGSSSNIGSNYVYWYQQLPGTAPKLLIYRNNQRPSGVPDRFSGSKSGTSASLAISGLRSEDEADYYCAAWDDSLSGYVFGTGTKLTVLTTTPAPRPPTPAPTIASQPLSLRPEACRPAAGGAVHTRGLDFACDIYIWAPLAGTCGVLLLSLVITLYCKRGRKKLLYIFKQPFMRPVQTTQEEDGCSCRFPEEEEGGCELRVKFSRSADAPAYKQGQNQLYNELNLGRREEYDVLDKRRGRDPEMGGKPRRKNPQEGLYNELQKDKMAEAYSEIGMKGERRRGKGHDGLYQGLSTATKDTYDALHMQALPPR

SEQ ID NO: 208 - DNA, 1485 bp, synthetic construct
  misc_feature 1..1485: note = source = /note="Description of Artificial Sequence: Synthetic polynucleotide"
  source 1..1485: mol_type = other DNA
atggccctccctgtcaccgccctgctgcttccgctggctcttctgctccacgccgctcggccccaagtgcaactcgtccaatccggcggcggactgattcaaccaggaggttcccttagactctcatgtgccgctagcggattcactgtgtcctcaaactacatgagctgggtccgccaggcgcccggaaagggcctggaatgggtgtccgtgatctactcgggcggatcaacctactacgccgattccgtgaaggggcggttcaccatctcgcgggataactccaagaacaccctgtacttgcaaatgaactcactgagggccgaagataccgccgtctactactgcgcgagccagtccactccctacgactcgagcgggtactactccggggacgccttcgacatctggggacagggaactatggtcacggtgtcgtcgggaggagggggcagcggcggcggaggaagcgggggagggggttcgtcctatgtgctgacccagccgccgagcgcctccgggactccgggccagcgcgtgaccatttcctgctccggctcctcatccaacatcggttcgaattatgtgtactggtaccagcagctgcctggtactgcccctaagcttctcatctaccggaacaaccagcgcccgtctggcgtgcccgaccggttctccggctcgaagtccggcaccagcgcctccctggctatctccgggctgagatccgaggatgaggccgactactattgcgcagcgtgggacgacagcctgtcgggatacgtgtttggaaccggaaccaagctcaccgtgctgaccactaccccagcaccgaggccacccaccccggctcctaccatcgcctcccagcctctgtccctgcgtccggaggcatgtagacccgcagctggtggggccgtgcatacccggggtcttgacttcgcctgcgatatctacatttgggcccctctggctggtacttgcggggtcctgctgctttcactcgtgatcactctttactgtaagcgcggtcggaagaagctgctgtacatctttaagcaacccttcatgaggcctgtgcagactactcaagaggaggacggctgttcatgccggttcccagaggaggaggaaggcggctgcgaactgcgcgtgaaattcagccgcagcgcagatgctccagcctacaagcaggggcagaaccagctctacaacgaactcaatcttggtcggagagaggagtacgacgtgctggacaagcggagaggacgggacccagaaatgggcgggaagccgcgcagaaagaatccccaagagggcctgtacaacgagctccaaaaggataagatggcagaagcctatagcgagattggtatgaaaggggaacgcagaagaggcaaaggccacgacggactgtaccagggactcagcaccgccaccaaggacacctatgacgctcttcacatgcaggccctgccgcctcgg

SEQ ID NO: 209 - protein, 251 aa, synthetic construct
  REGION 1..251: note = source = /note="Description of Artificial Sequence: Synthetic polypeptide"
EVQLQQSGPGLVKPSQTLSLTCAISGDSVSSNSAAWNWIRQSPSRGLEWLGRTYYRSKWYNDYAVSVKSRITINPDTSKNQFSLQLNSVTPEDTAVYYCARDLGWIAVAGTFDYWGQGTLVTVSSGGGGSGGGGSGGGGSQSALTQPASVSGSPGQSITISCTGTSSDVGGYNYVSWYQQHPGKAPKLMIYDVSKRPSGVSNRFSGSKSGNTASLTISGLQAEDEADYYCSSYTSSSLNHVFGTGTKVTVL

SEQ ID NO: 210 - DNA, 753 bp, synthetic construct
  misc_feature 1..753: note = source = /note="Description of Artificial Sequence: Synthetic polynucleotide"
  source 1..753: mol_type = other DNA
gaagtgcaactccaacagagcggacccggacttgtgaaaccatcccagactctcagcctgacgtgtgcgatcagcggggactctgtgtcctccaactccgccgcctggaactggattaggcagtcgccgtcgagagggctggagtggttgggtagaacctactaccggtccaagtggtacaatgactacgccgtgtccgtgaagtcccggatcactattaacccggatacctcaaagaaccagttctccctgcaactgaactcggtgacccctgaggacaccgcagtgtactactgcgcccgggatctgggttggatcgctgtcgccggcaccttcgactattggggacagggcactctcgtgaccgtgtcgtcgggtggaggagggagcggagggggcggaagcggtggcggcggttcccagtccgcgctgacccagcctgctagcgtgtccgggtcgcccggacagtcaatcaccatctcctgcactgggactagcagcgacgtgggcggctacaactacgtgtcatggtaccagcagcacccgggaaaggcgcccaagctgatgatctacgacgtgtccaagcgcccttcgggagtctccaaccgctttagcggctccaagtcgggcaacactgcctccctgaccattagcggactgcaggccgaagatgaggccgactattactgctcatcctacacctcctcctcactgaaccatgtgttcggcaccggaaccaaggtcacagtcctc

SEQ ID NO: 211 - DNA, 846 bp, synthetic construct
  misc_feature 1..846: note = source = /note="Description of Artificial Sequence: Synthetic polynucleotide"
  source 1..846: mol_type = other DNA
atggccctccctgtcaccgccctgctgcttccgctggctcttctgctccacgccgctcggcccgaagtgcaactccaacagagcggacccggacttgtgaaaccatcccagactctcagcctgacgtgtgcgatcagcggggactctgtgtcctccaactccgccgcctggaactggattaggcagtcgccgtcgagagggctggagtggttgggtagaacctactaccggtccaagtggtacaatgactacgccgtgtccgtgaagtcccggatcactattaacccggatacctcaaagaaccagttctccctgcaactgaactcggtgacccctgaggacaccgcagtgtactactgcgcccgggatctgggttggatcgctgtcgccggcaccttcgactattggggacagggcactctcgtgaccgtgtcgtcgggtggaggagggagcggagggggcggaagcggtggcggcggttcccagtccgcgctgacccagcctgctagcgtgtccgggtcgcccggacagtcaatcaccatctcctgcactgggactagcagcgacgtgggcggctacaactacgtgtcatggtaccagcagcacccgggaaaggcgcccaagctgatgatctacgacgtgtccaagcgcccttcgggagtctccaaccgctttagcggctccaagtcgggcaacactgcctccctgaccattagcggactgcaggccgaagatgaggccgactattactgctcatcctacacctcctcctcactgaaccatgtgttcggcaccggaaccaaggtcacagtcctcggatcgcaccaccatcaccatcatcatcac

SEQ ID NO: 212 - protein, 282 aa, synthetic construct
  REGION 1..282: note = source = /note="Description of Artificial Sequence: Synthetic polypeptide"
MALPVTALLLPLALLLHAARPEVQLQQSGPGLVKPSQTLSLTCAISGDSVSSNSAAWNWIRQSPSRGLEWLGRTYYRSKWYNDYAVSVKSRITINPDTSKNQFSLQLNSVTPEDTAVYYCARDLGWIAVAGTFDYWGQGTLVTVSSGGGGSGGGGSGGGGSQSALTQPASVSGSPGQSITISCTGTSSDVGGYNYVSWYQQHPGKAPKLMIYDVSKRPSGVSNRFSGSKSGNTASLTISGLQAEDEADYYCSSYTSSSLNHVFGTGTKVTVLGSHHHHHHHH

SEQ ID NO: 213 - protein, 495 aa, synthetic construct
  REGION 1..495: note = source = /note="Description of Artificial Sequence: Synthetic polypeptide"
MALPVTALLLPLALLLHAARPEVQLQQSGPGLVKPSQTLSLTCAISGDSVSSNSAAWNWIRQSPSRGLEWLGRTYYRSKWYNDYAVSVKSRITINPDTSKNQFSLQLNSVTPEDTAVYYCARDLGWIAVAGTFDYWGQGTLVTVSSGGGGSGGGGSGGGGSQSALTQPASVSGSPGQSITISCTGTSSDVGGYNYVSWYQQHPGKAPKLMIYDVSKRPSGVSNRFSGSKSGNTASLTISGLQAEDEADYYCSSYTSSSLNHVFGTGTKVTVLTTTPAPRPPTPAPTIASQPLSLRPEACRPAAGGAVHTRGLDFACDIYIWAPLAGTCGVLLLSLVITLYCKRGRKKLLYIFKQPFMRPVQTTQEEDGCSCRFPEEEEGGCELRVKFSRSADAPAYKQGQNQLYNELNLGRREEYDVLDKRRGRDPEMGGKPRRKNPQEGLYNELQKDKMAEAYSEIGMKGERRRGKGHDGLYQGLSTATKDTYDALHMQALPPR

SEQ ID NO: 214 - DNA, 1485 bp, synthetic construct
  misc_feature 1..1485: note = source = /note="Description of Artificial Sequence: Synthetic polynucleotide"
  source 1..1485: mol_type = other DNA
atggccctccctgtcaccgccctgctgcttccgctggctcttctgctccacgccgctcggcccgaagtgcaactccaacagagcggacccggacttgtgaaaccatcccagactctcagcctgacgtgtgcgatcagcggggactctgtgtcctccaactccgccgcctggaactggattaggcagtcgccgtcgagagggctggagtggttgggtagaacctactaccggtccaagtggtacaatgactacgccgtgtccgtgaagtcccggatcactattaacccggatacctcaaagaaccagttctccctgcaactgaactcggtgacccctgaggacaccgcagtgtactactgcgcccgggatctgggttggatcgctgtcgccggcaccttcgactattggggacagggcactctcgtgaccgtgtcgtcgggtggaggagggagcggagggggcggaagcggtggcggcggttcccagtccgcgctgacccagcctgctagcgtgtccgggtcgcccggacagtcaatcaccatctcctgcactgggactagcagcgacgtgggcggctacaactacgtgtcatggtaccagcagcacccgggaaaggcgcccaagctgatgatctacgacgtgtccaagcgcccttcgggagtctccaaccgctttagcggctccaagtcgggcaacactgcctccctgaccattagcggactgcaggccgaagatgaggccgactattactgctcatcctacacctcctcctcactgaaccatgtgttcggcaccggaaccaaggtcacagtcctcaccactaccccagcaccgaggccacccaccccggctcctaccatcgcctcccagcctctgtccctgcgtccggaggcatgtagacccgcagctggtggggccgtgcatacccggggtcttgacttcgcctgcgatatctacatttgggcccctctggctggtacttgcggggtcctgctgctttcactcgtgatcactctttactgtaagcgcggtcggaagaagctgctgtacatctttaagcaacccttcatgaggcctgtgcagactactcaagaggaggacggctgttcatgccggttcccagaggaggaggaaggcggctgcgaactgcgcgtgaaattcagccgcagcgcagatgctccagcctacaagcaggggcagaaccagctctacaacgaactcaatcttggtcggagagaggagtacgacgtgctggacaagcggagaggacgggacccagaaatgggcgggaagccgcgcagaaagaatccccaagagggcctgtacaacgagctccaaaaggataagatggcagaagcctatagcgagattggtatgaaaggggaacgcagaagaggcaaaggccacgacggactgtaccagggactcagcaccgccaccaaggacacctatgacgctcttcacatgcaggccctgccgcctcgg

SEQ ID NO: 215 - protein, 253 aa, synthetic construct
  REGION 1..253: note = source = /note="Description of Artificial Sequence: Synthetic polypeptide"
EVQLQQSGPGLVKPSQTLSLTCAISGDSVLSNSDTWNWIRQSPSRGLEWLGRTYHRSTWYDDYASSVRGRVSINVDTSKNQYSLQLNAVTPEDTGAYYCARDRLQDGNSWSDAFDVWGQGTMVTVSSGGGGSGGGGSGGGGSQSALTQPASVSGSPGQSITISCTGTSSDVGGYNYVSWYQQHPGKAPKLMIYDVSNRPSGVSNRFSGSKSGNTASLTISGLQAEDEADYYCSSYTSSSTPYVFGTGTQLTVL

SEQ ID NO: 216 - DNA, 759 bp, synthetic construct
  misc_feature 1..759: note = source = /note="Description of Artificial Sequence: Synthetic polynucleotide"
  source 1..759: mol_type = other DNA
gaagtgcaactccaacagagcggacccggacttgtgaaaccttcccaaactctctccctgacctgtgcgatctctggggattcggtgctgtcgaatagcgacacctggaactggatcagacagtcaccctcccggggcctggagtggctcgggagaacttaccaccggtccacttggtacgacgactatgccagctcagtgcgcggaagggtgtccattaacgtggacacctccaagaaccagtacagcctgcagttgaacgctgtgaccccggaagataccggagcctactactgcgcccgcgaccggctgcaggacggaaactcctggtccgatgccttcgacgtctggggccagggaaccatggtcactgtgtcatccggcggtggcggttcgggcggtggtggcagcggtggaggcggctcccagtcggcactgactcagccagcttcagtctccggctcgccgggacagtccatcaccatttcctgcactggaaccagctccgatgtcggggggtataactacgtgtcgtggtaccagcaacatcctggaaaggcccccaagctcatgatctacgacgtgtccaatcgccctagcggagtgtcaaaccggttttccggctccaagtccgggaacaccgcgtccctgacaatcagcggactgcaggccgaggacgaagccgactactactgctcgagctacaccagctcgtccacgccgtacgtgttcggaactgggacccagctgaccgtgctg

SEQ ID NO: 217 - DNA, 852 bp, synthetic construct
  misc_feature 1..852: note = source = /note="Description of Artificial Sequence: Synthetic polynucleotide"
  source 1..852: mol_type = other DNA
atggccctccctgtcaccgccctgctgcttccgctggctcttctgctccacgccgctcggcccgaagtgcaactccaacagagcggacccggacttgtgaaaccttcccaaactctctccctgacctgtgcgatctctggggattcggtgctgtcgaatagcgacacctggaactggatcagacagtcaccctcccggggcctggagtggctcgggagaacttaccaccggtccacttggtacgacgactatgccagctcagtgcgcggaagggtgtccattaacgtggacacctccaagaaccagtacagcctgcagttgaacgctgtgaccccggaagataccggagcctactactgcgcccgcgaccggctgcaggacggaaactcctggtccgatgccttcgacgtctggggccagggaaccatggtcactgtgtcatccggcggtggcggttcgggcggtggtggcagcggtggaggcggctcccagtcggcactgactcagccagcttcagtctccggctcgccgggacagtccatcaccatttcctgcactggaaccagctccgatgtcggggggtataactacgtgtcgtggtaccagcaacatcctggaaaggcccccaagctcatgatctacgacgtgtccaatcgccctagcggagtgtcaaaccggttttccggctccaagtccgggaacaccgcgtccctgacaatcagcggactgcaggccgaggacgaagccgactactactgctcgagctacaccagctcgtccacgccgtacgtgttcggaactgggacccagctgaccgtgctgggatcgcaccaccatcaccatcatcatcac

SEQ ID NO: 218 - protein, 284 aa, synthetic construct
  REGION 1..284: note = source = /note="Description of Artificial Sequence: Synthetic polypeptide"
MALPVTALLLPLALLLHAARPEVQLQQSGPGLVKPSQTLSLTCAISGDSVLSNSDTWNWIRQSPSRGLEWLGRTYHRSTWYDDYASSVRGRVSINVDTSKNQYSLQLNAVTPEDTGAYYCARDRLQDGNSWSDAFDVWGQGTMVTVSSGGGGSGGGGSGGGGSQSALTQPASVSGSPGQSITISCTGTSSDVGGYNYVSWYQQHPGKAPKLMIYDVSNRPSGVSNRFSGSKSGNTASLTISGLQAEDEADYYCSSYTSSSTPYVFGTGTQLTVLGSHHHHHHHH

SEQ ID NO: 219 - protein, 497 aa, synthetic construct
  REGION 1..497: note = source = /note="Description of Artificial Sequence: Synthetic polypeptide"
MALPVTALLLPLALLLHAARPEVQLQQSGPGLVKPSQTLSLTCAISGDSVLSNSDTWNWIRQSPSRGLEWLGRTYHRSTWYDDYASSVRGRVSINVDTSKNQYSLQLNAVTPEDTGAYYCARDRLQDGNSWSDAFDVWGQGTMVTVSSGGGGSGGGGSGGGGSQSALTQPASVSGSPGQSITISCTGTSSDVGGYNYVSWYQQHPGKAPKLMIYDVSNRPSGVSNRFSGSKSGNTASLTISGLQAEDEADYYCSSYTSSSTPYVFGTGTQLTVLTTTPAPRPPTPAPTIASQPLSLRPEACRPAAGGAVHTRGLDFACDIYIWAPLAGTCGVLLLSLVITLYCKRGRKKLLYIFKQPFMRPVQTTQEEDGCSCRFPEEEEGGCELRVKFSRSADAPAYKQGQNQLYNELNLGRREEYDVLDKRRGRDPEMGGKPRRKNPQEGLYNELQKDKMAEAYSEIGMKGERRRGKGHDGLYQGLSTATKDTYDALHMQALPPR

SEQ ID NO: 220 - DNA, 1491 bp, synthetic construct
  misc_feature 1..1491: note = source = /note="Description of Artificial Sequence: Synthetic polynucleotide"
  source 1..1491: mol_type = other DNA
atggccctccctgtcaccgccctgctgcttccgctggctcttctgctccacgccgctcggcccgaagtgcaactccaacagagcggacccggacttgtgaaaccttcccaaactctctccctgacctgtgcgatctctggggattcggtgctgtcgaatagcgacacctggaactggatcagacagtcaccctcccggggcctggagtggctcgggagaacttaccaccggtccacttggtacgacgactatgccagctcagtgcgcggaagggtgtccattaacgtggacacctccaagaaccagtacagcctgcagttgaacgctgtgaccccggaagataccggagcctactactgcgcccgcgaccggctgcaggacggaaactcctggtccgatgccttcgacgtctggggccagggaaccatggtcactgtgtcatccggcggtggcggttcgggcggtggtggcagcggtggaggcggctcccagtcggcactgactcagccagcttcagtctccggctcgccgggacagtccatcaccatttcctgcactggaaccagctccgatgtcggggggtataactacgtgtcgtggtaccagcaacatcctggaaaggcccccaagctcatgatctacgacgtgtccaatcgccctagcggagtgtcaaaccggttttccggctccaagtccgggaacaccgcgtccctgacaatcagcggactgcaggccgaggacgaagccgactactactgctcgagctacaccagctcgtccacgccgtacgtgttcggaactgggacccagctgaccgtgctgaccactaccccagcaccgaggccacccaccccggctcctaccatcgcctcccagcctctgtccctgcgtccggaggcatgtagacccgcagctggtggggccgtgcatacccggggtcttgacttcgcctgcgatatctacatttgggcccctctggctggtacttgcggggtcctgctgctttcactcgtgatcactctttactgtaagcgcggtcggaagaagctgctgtacatctttaagcaacccttcatgaggcctgtgcagactactcaagaggaggacggctgttcatgccggttcccagaggaggaggaaggcggctgcgaactgcgcgtgaaattcagccgcagcgcagatgctccagcctacaagcaggggcagaaccagctctacaacgaactcaatcttggtcggagagaggagtacgacgtgctggacaagcggagaggacgggacccagaaatgggcgggaagccgcgcagaaagaatccccaagagggcctgtacaacgagctccaaaaggataagatggcagaagcctatagcgagattggtatgaaaggggaacgcagaagaggcaaaggccacgacggactgtaccagggactcagcaccgccaccaaggacacctatgacgctcttcacatgcaggccctgccgcctcgg

SEQ ID NO: 221 - protein, 246 aa, synthetic construct
  REGION 1..246: note = source = /note="Description of Artificial Sequence: Synthetic polypeptide"
EVQLVESGGGLVQPGRSLRLSCAASGFTFDDYAMHWVRQAPGKGLEWVSGISWNSGSIGYADSVKGRFTISRDNAKNSLYLQMNSLRAEDTALYYCAKGLSSWHFHDALDIWGQGTMVTVSSGGGGSGGGGSGGGGSSSELTQDPAVSVALGQTVRITCQGDSLRSYYASWYQQKPGQAPVLVIYGKNNRPSGIPDRFSGSSSGNTASLTITGAQAEDEADYYCNSRDSSGNHLWVFGGGTKLTVL

SEQ ID NO: 222 - DNA, 738 bp, synthetic construct
  misc_feature 1..738: note = source = /note="Description of Artificial Sequence: Synthetic polynucleotide"
  source 1..738: mol_type = other DNA
gaagtgcagttggtggaatcaggaggaggacttgtgcaacctggaagatctctcagactctcgtgtgcggcctccggtttcaccttcgacgactacgccatgcattgggtcagacaggccccgggaaagggcctggagtgggtgtcaggcatctcatggaacagcggctccattggctacgccgactcggtcaagggaaggttcactatctcccgggacaacgccaagaactccctgtacctccaaatgaacagcctgcgcgccgaggatactgccctgtactactgcgccaaggggctgtccagctggcactttcacgacgcacttgatatctggggacagggtaccatggtcaccgtgtcctccggtggcggaggctcagggggaggaggaagcgggggcggtggttcctcctccgaactgacccaggacccggccgtgtccgtggcgctgggacaaaccgtgcgcattacttgccagggcgacagcttgcggtcgtactacgcctcgtggtaccagcagaagcccggccaggctcccgtgctggtcatctatggcaaaaacaaccgcccgagcggaattccagaccggttctccgggagctcgtccgggaacaccgcttcgctcaccatcacgggggcccaggcggaggacgaagcagattactactgcaactcgcgggattccagcggcaatcacctctgggtgttcgggggcggaaccaagctgactgtgctg

SEQ ID NO: 223 - DNA, 831 bp, synthetic construct
  misc_feature 1..831: note = source = /note="Description of Artificial Sequence: Synthetic polynucleotide"
  source 1..831: mol_type = other DNA
atggccctccctgtcaccgccctgctgcttccgctggctcttctgctccacgccgctcggcccgaagtgcagttggtggaatcaggaggaggacttgtgcaacctggaagatctctcagactctcgtgtgcggcctccggtttcaccttcgacgactacgccatgcattgggtcagacaggccccgggaaagggcctggagtgggtgtcaggcatctcatggaacagcggctccattggctacgccgactcggtcaagggaaggttcactatctcccgggacaacgccaagaactccctgtacctccaaatgaacagcctgcgcgccgaggatactgccctgtactactgcgccaaggggctgtccagctggcactttcacgacgcacttgatatctggggacagggtaccatggtcaccgtgtcctccggtggcggaggctcagggggaggaggaagcgggggcggtggttcctcctccgaactgacccaggacccggccgtgtccgtggcgctgggacaaaccgtgcgcattacttgccagggcgacagcttgcggtcgtactacgcctcgtggtaccagcagaagcccggccaggctcccgtgctggtcatctatggcaaaaacaaccgcccgagcggaattccagaccggttctccgggagctcgtccgggaacaccgcttcgctcaccatcacgggggcccaggcggaggacgaagcagattactactgcaactcgcgggattccagcggcaatcacctctgggtgttcgggggcggaaccaagctgactgtgctgggatcgcaccaccatcaccatcatcatcac

SEQ ID NO: 224 - protein, 277 aa, synthetic construct
  REGION 1..277: note = source = /note="Description of Artificial Sequence: Synthetic polypeptide"
MALPVTALLLPLALLLHAARPEVQLVESGGGLVQPGRSLRLSCAASGFTFDDYAMHWVRQAPGKGLEWVSGISWNSGSIGYADSVKGRFTISRDNAKNSLYLQMNSLRAEDTALYYCAKGLSSWHFHDALDIWGQGTMVTVSSGGGGSGGGGSGGGGSSSELTQDPAVSVALGQTVRITCQGDSLRSYYASWYQQKPGQAPVLVIYGKNNRPSGIPDRFSGSSSGNTASLTITGAQAEDEADYYCNSRDSSGNHLWVFGGGTKLTVLGSHHHHHHHH

SEQ ID NO: 225 - protein, 490 aa, synthetic construct
  REGION 1..490: note = source = /note="Description of Artificial Sequence: Synthetic polypeptide"
MALPVTALLLPLALLLHAARPEVQLVESGGGLVQPGRSLRLSCAASGFTFDDYAMHWVRQAPGKGLEWVSGISWNSGSIGYADSVKGRFTISRDNAKNSLYLQMNSLRAEDTALYYCAKGLSSWHFHDALDIWGQGTMVTVSSGGGGSGGGGSGGGGSSSELTQDPAVSVALGQTVRITCQGDSLRSYYASWYQQKPGQAPVLVIYGKNNRPSGIPDRFSGSSSGNTASLTITGAQAEDEADYYCNSRDSSGNHLWVFGGGTKLTVLTTTPAPRPPTPAPTIASQPLSLRPEACRPAAGGAVHTRGLDFACDIYIWAPLAGTCGVLLLSLVITLYCKRGRKKLLYIFKQPFMRPVQTTQEEDGCSCRFPEEEEGGCELRVKFSRSADAPAYKQGQNQLYNELNLGRREEYDVLDKRRGRDPEMGGKPRRKNPQEGLYNELQKDKMAEAYSEIGMKGERRRGKGHDGLYQGLSTATKDTYDALHMQALPPR

SEQ ID NO: 226 - DNA, 1470 bp, synthetic construct
  misc_feature 1..1470: note = source = /note="Description of Artificial Sequence: Synthetic polynucleotide"
  source 1..1470: mol_type = other DNA
atggccctccctgtcaccgccctgctgcttccgctggctcttctgctccacgccgctcggcccgaagtgcagttggtggaatcaggaggaggacttgtgcaacctggaagatctctcagactctcgtgtgcggcctccggtttcaccttcgacgactacgccatgcattgggtcagacaggccccgggaaagggcctggagtgggtgtcaggcatctcatggaacagcggctccattggctacgccgactcggtcaagggaaggttcactatctcccgggacaacgccaagaactccctgtacctccaaatgaacagcctgcgcgccgaggatactgccctgtactactgcgccaaggggctgtccagctggcactttcacgacgcacttgatatctggggacagggtaccatggtcaccgtgtcctccggtggcggaggctcagggggaggaggaagcgggggcggtggttcctcctccgaactgacccaggacccggccgtgtccgtggcgctgggacaaaccgtgcgcattacttgccagggcgacagcttgcggtcgtactacgcctcgtggtaccagcagaagcccggccaggctcccgtgctggtcatctatggcaaaaacaaccgcccgagcggaattccagaccggttctccgggagctcgtccgggaacaccgcttcgctcaccatcacgggggcccaggcggaggacgaagcagattactactgcaactcgcgggattccagcggcaatcacctctgggtgttcgggggcggaaccaagctgactgtgctgaccactaccccagcaccgaggccacccaccccggctcctaccatcgcctcccagcctctgtccctgcgtccggaggcatgtagacccgcagctggtggggccgtgcatacccggggtcttgacttcgcctgcgatatctacatttgggcccctctggctggtacttgcggggtcctgctgctttcactcgtgatcactctttactgtaagcgcggtcggaagaagctgctgtacatctttaagcaacccttcatgaggcctgtgcagactactcaagaggaggacggctgttcatgccggttcccagaggaggaggaaggcggctgcgaactgcgcgtgaaattcagccgcagcgcagatgctccagcctacaagcaggggcagaaccagctctacaacgaactcaatcttggtcggagagaggagtacgacgtgctggacaagcggagaggacgggacccagaaatgggcgggaagccgcgcagaaagaatccccaagagggcctgtacaacgagctccaaaaggataagatggcagaagcctatagcgagattggtatgaaaggggaacgcagaagaggcaaaggccacgacggactgtaccagggactcagcaccgccaccaaggacacctatgacgctcttcacatgcaggccctgccgcctcgg

SEQ ID NO: 227 - protein, 245 aa, synthetic construct
  REGION 1..245: note = source = /note="Description of Artificial Sequence: Synthetic polypeptide"
EVQLVESGGGLVQPGRSLRLSCAASGFTFDDYAMHWVRQAPGKGLEWVSGISWNSGSIGYADSVKGRFTISRDNAKNSLYLQMNSLRAEDTALYYCAKDKGGGYYDFWSGSDYWGQGTLVTVSSGGGGSGGGGSGGGGSSSELTQDPAVSVALGQTVRITCQGDSLRSYYASWYQQKPGQAPVLVIYGKNNRPSGIPDRFSGSSSGNTASLTITGAQAEDEADYYCNSRDSSGWVFGGGTKLTVL

SEQ ID NO: 228 - DNA, 828 bp, synthetic construct
  misc_feature 1..828: note = source = /note="Description of Artificial Sequence: Synthetic polynucleotide"
  source 1..828: mol_type = other DNA
atggccctccctgtcaccgccctgctgcttccgctggctcttctgctccacgccgctcggcccgaagtgcaacttgtggaatctggtggaggacttgtgcaacctggaagatcactgagactgtcatgtgcagcctcggggtttaccttcgacgactacgccatgcactgggtgcgccaggctccggggaagggcctcgaatgggtgtcgggcatcagctggaactccggttccattggctatgcggactccgtgaaaggacgcttcacaatttcccgggataacgccaagaacagcctgtacttgcagatgaactccctgcgggccgaggataccgccctgtactactgcgctaaggacaagggcggtggatactacgacttctggagcggaagcgactactggggacagggaactctggtcaccgtgtcctccggcggagggggctccggcggcggtggtagcgggggtggagggtcgtcgtcggagctgacccaggaccccgcagtgtccgtcgccctggggcagactgtgcggatcacttgccaaggagacagcctgcggtcctactacgcgtcctggtatcagcagaagccggggcaggccccagtcctcgtcatctacggaaagaacaataggcccagcggaatccctgaccgcttctcgggctcatcctccggcaacaccgcctccctgaccatcacgggcgcgcaggccgaggacgaagccgattactactgcaactcacgggattccagcggatgggtgttcggaggaggaaccaagctcactgtgctcggatcgcaccaccatcaccatcatcatcac

SEQ ID NO: 229 - protein, 276 aa, synthetic construct
  REGION 1..276: note = source = /note="Description of Artificial Sequence: Synthetic polypeptide"
MALPVTALLLPLALLLHAARPEVQLVESGGGLVQPGRSLRLSCAASGFTFDDYAMHWVRQAPGKGLEWVSGISWNSGSIGYADSVKGRFTISRDNAKNSLYLQMNSLRAEDTALYYCAKDKGGGYYDFWSGSDYWGQGTLVTVSSGGGGSGGGGSGGGGSSSELTQDPAVSVALGQTVRITCQGDSLRSYYASWYQQKPGQAPVLVIYGKNNRPSGIPDRFSGSSSGNTASLTITGAQAEDEADYYCNSRDSSGWVFGGGTKLTVLGSHHHHHHHH

SEQ ID NO: 230 - protein, 489 aa, synthetic construct
  REGION 1..489: note = source = /note="Description of Artificial Sequence: Synthetic polypeptide"
MALPVTALLLPLALLLHAARPEVQLVESGGGLVQPGRSLRLSCAASGFTFDDYAMHWVRQAPGKGLEWVSGISWNSGSIGYADSVKGRFTISRDNAKNSLYLQMNSLRAEDTALYYCAKDKGGGYYDFWSGSDYWGQGTLVTVSSGGGGSGGGGSGGGGSSSELTQDPAVSVALGQTVRITCQGDSLRSYYASWYQQKPGQAPVLVIYGKNNRPSGIPDRFSGSSSGNTASLTITGAQAEDEADYYCNSRDSSGWVFGGGTKLTVLTTTPAPRPPTPAPTIASQPLSLRPEACRPAAGGAVHTRGLDFACDIYIWAPLAGTCGVLLLSLVITLYCKRGRKKLLYIFKQPFMRPVQTTQEEDGCSCRFPEEEEGGCELRVKFSRSADAPAYKQGQNQLYNELNLGRREEYDVLDKRRGRDPEMGGKPRRKNPQEGLYNELQKDKMAEAYSEIGMKGERRRGKGHDGLYQGLSTATKDTYDALHMQALPPR

SEQ ID NO: 231 - DNA, 1467 bp, synthetic construct
  misc_feature 1..1467: note = source = /note="Description of Artificial Sequence: Synthetic polynucleotide"
  source 1..1467: mol_type = other DNA
atggccctccctgtcaccgccctgctgcttccgctggctcttctgctccacgccgctcggcccgaagtgcaacttgtggaatctggtggaggacttgtgcaacctggaagatcactgagactgtcatgtgcagcctcggggtttaccttcgacgactacgccatgcactgggtgcgccaggctccggggaagggcctcgaatgggtgtcgggcatcagctggaactccggttccattggctatgcggactccgtgaaaggacgcttcacaatttcccgggataacgccaagaacagcctgtacttgcagatgaactccctgcgggccgaggataccgccctgtactactgcgctaaggacaagggcggtggatactacgacttctggagcggaagcgactactggggacagggaactctggtcaccgtgtcctccggcggagggggctccggcggcggtggtagcgggggtggagggtcgtcgtcggagctgacccaggaccccgcagtgtccgtcgccctggggcagactgtgcggatcacttgccaaggagacagcctgcggtcctactacgcgtcctggtatcagcagaagccggggcaggccccagtcctcgtcatctacggaaagaacaataggcccagcggaatccctgaccgcttctcgggctcatcctccggcaacaccgcctccctgaccatcacgggcgcgcaggccgaggacgaagccgattactactgcaactcacgggattccagcggatgggtgttcggaggaggaaccaagctcactgtgctcaccactaccccagcaccgaggccacccaccccggctcctaccatcgcctcccagcctctgtccctgcgtccggaggcatgtagacccgcagctggtggggccgtgcatacccggggtcttgacttcgcctgcgatatctacatttgggcccctctggctggtacttgcggggtcctgctgctttcactcgtgatcactctttactgtaagcgcggtcggaagaagctgctgtacatctttaagcaacccttcatgaggcctgtgcagactactcaagaggaggacggctgttcatgccggttcccagaggaggaggaaggcggctgcgaactgcgcgtgaaattcagccgcagcgcagatgctccagcctacaagcaggggcagaaccagctctacaacgaactcaatcttggtcggagagaggagtacgacgtgctggacaagcggagaggacgggacccagaaatgggcgggaagccgcgcagaaagaatccccaagagggcctgtacaacgagctccaaaaggataagatggcagaagcctatagcgagattggtatgaaaggggaacgcagaagaggcaaaggccacgacggactgtaccagggactcagcaccgccaccaaggacacctatgacgctcttcacatgcaggccctgccgcctcgg

SEQ ID NO: 232 - protein, 247 aa, synthetic construct
  REGION 1..247: note = source = /note="Description of Artificial Sequence: Synthetic polypeptide"
EVQLQQSGPGLVKPSLTLSLTCAISGDSVSSNSATWTWIRQSPSRGLEWLGRTYYRSTWYNDYAVSVKSRITINPDTSKNQFSLQLNSVTPEDTAVYYCAREGSGSYYAYWGQGTLVTVSSGGGGSGGGGSGGGGSQSALTQPASVSGSPGQSITISCTGTSSDVGGYNYVSWYQQHPGKAPKLMIYDVSNRPSGVSNRFSGSKSGNTASLTISGLQAEDEADYYCSSYTSSSTLYVFGTGTKVTVL

SEQ ID NO: 233 - DNA, 741 bp, synthetic construct
  misc_feature 1..741: note = source = /note="Description of Artificial Sequence: Synthetic polynucleotide"
  source 1..741: mol_type = other DNA
gaagtgcaactccaacaatcaggtccaggactcgtcaaaccctcgcttactctgtcgctgacttgtgctatctcgggagactccgtgagctccaacagcgccacctggacttggattagacagtccccgtcacggggcctcgaatggctgggaaggacctactaccggagcacctggtacaacgactatgctgtgtccgtgaagtcccgcatcaccatcaaccccgatacctccaagaaccagttcagcttgcaactgaactccgtgacccctgaggatacggccgtctattactgcgcccgcgaggggtccggttcctactacgcctactggggacagggtactctggtcaccgtgtcgagcggagggggggggtccggcggaggaggatctggtggcggaggctcccagtccgcgctgacccagcctgcgtccgtgtccggctcaccgggccagtctatcaccattagctgcaccggcactagctcagacgtgggagggtacaactacgtgtcgtggtaccagcagcaccctggaaaggccccgaagctgatgatctacgacgtgtccaaccggcccagcggggtgtcgaatcgcttctccggctcaaagtccggcaacacagccagcctgaccattagcggactgcaggccgaggatgaagcagactactactgctcgtcctacacctcctcctcgactctctacgtgtttggcaccggaactaaggtcaccgtgctg

SEQ ID NO: 234 - DNA, 834 bp, synthetic construct
  misc_feature 1..834: note = source = /note="Description of Artificial Sequence: Synthetic polynucleotide"
  source 1..834: mol_type = other DNA
atggccctccctgtcaccgccctgctgcttccgctggctcttctgctccacgccgctcggcccgaagtgcaactccaacaatcaggtccaggactcgtcaaaccctcgcttactctgtcgctgacttgtgctatctcgggagactccgtgagctccaacagcgccacctggacttggattagacagtccccgtcacggggcctcgaatggctgggaaggacctactaccggagcacctggtacaacgactatgctgtgtccgtgaagtcccgcatcaccatcaaccccgatacctccaagaaccagttcagcttgcaactgaactccgtgacccctgaggatacggccgtctattactgcgcccgcgaggggtccggttcctactacgcctactggggacagggtactctggtcaccgtgtcgagcggagggggggggtccggcggaggaggatctggtggcggaggctcccagtccgcgctgacccagcctgcgtccgtgtccggctcaccgggccagtctatcaccattagctgcaccggcactagctcagacgtgggagggtacaactacgtgtcgtggtaccagcagcaccctggaaaggccccgaagctgatgatctacgacgtgtccaaccggcccagcggggtgtcgaatcgcttctccggctcaaagtccggcaacacagccagcctgaccattagcggactgcaggccgaggatgaagcagactactactgctcgtcctacacctcctcctcgactctctacgtgtttggcaccggaactaaggtcaccgtgctgggatcgcaccaccatcaccatcatcatcac

SEQ ID NO: 235 - protein, 279 aa, synthetic construct
  REGION 1..279: note = source = /note="Description of Artificial Sequence: Synthetic polypeptide"
MALPVTALLLPLALLLHAARPEVQLQQSGPGLVKPSLTLSLTCAISGDSVSSNSATWTWIRQSPSRGLEWLGRTYYRSTWYNDYAVSVKSRITINPDTSKNQFSLQLNSVTPEDTAVYYCAREGSGSYYAYWGQGTLVTVSSGGGGSGGGGSGGGGSQSALTQPASVSGSPGQSITISCTGTSSDVGGYNYVSWYQQHPGKAPKLMIYDVSNRPSGVSNRFSGSKSGNTASLTISGLQAEDEADYYCSSYTSSSTLYVFGTGTKVTVLGSHHHHHHHHH

SEQ ID NO: 236 - protein, 491 aa, synthetic construct
  REGION 1..491: note = source = /note="Description of Artificial Sequence: Synthetic polypeptide"
MALPVTALLLPLALLLHAARPEVQLQQSGPGLVKPSLTLSLTCAISGDSVSSNSATWTWIRQSPSRGLEWLGRTYYRSTWYNDYAVSVKSRITINPDTSKNQFSLQLNSVTPEDTAVYYCAREGSGSYYAYWGQGTLVTVSSGGGGSGGGGSGGGGSQSALTQPASVSGSPGQSITISCTGTSSDVGGYNYVSWYQQHPGKAPKLMIYDVSNRPSGVSNRFSGSKSGNTASLTISGLQAEDEADYYCSSYTSSSTLYVFGTGTKVTVLTTTPAPRPPTPAPTIASQPLSLRPEACRPAAGGAVHTRGLDFACDIYIWAPLAGTCGVLLLSLVITLYCKRGRKKLLYIFKQPFMRPVQTTQEEDGCSCRFPEEEEGGCELRVKFSRSADAPAYKQGQNQLYNELNLGRREEYDVLDKRRGRDPEMGGKPRRKNPQEGLYNELQKDKMAEAYSEIGMKGERRRGKGHDGLYQGLSTATKDTYDALHMQALPPR

SEQ ID NO: 237 - DNA, 1473 bp, synthetic construct
  misc_feature 1..1473: note = source = /note="Description of Artificial Sequence: Synthetic polynucleotide"
  source 1..1473: mol_type = other DNA
atggccctccctgtcaccgccctgctgcttccgctggctcttctgctccacgccgctcggcccgaagtgcaactccaacaatcaggtccaggactcgtcaaaccctcgcttactctgtcgctgacttgtgctatctcgggagactccgtgagctccaacagcgccacctggacttggattagacagtccccgtcacggggcctcgaatggctgggaaggacctactaccggagcacctggtacaacgactatgctgtgtccgtgaagtcccgcatcaccatcaaccccgatacctccaagaaccagttcagcttgcaactgaactccgtgacccctgaggatacggccgtctattactgcgcccgcgaggggtccggttcctactacgcctactggggacagggtactctggtcaccgtgtcgagcggagggggggggtccggcggaggaggatctggtggcggaggctcccagtccgcgctgacccagcctgcgtccgtgtccggctcaccgggccagtctatcaccattagctgcaccggcactagctcagacgtgggagggtacaactacgtgtcgtggtaccagcagcaccctggaaaggccccgaagctgatgatctacgacgtgtccaaccggcccagcggggtgtcgaatcgcttctccggctcaaagtccggcaacacagccagcctgaccattagcggactgcaggccgaggatgaagcagactactactgctcgtcctacacctcctcctcgactctctacgtgtttggcaccggaactaaggtcaccgtgctgaccactaccccagcaccgaggccacccaccccggctcctaccatcgcctcccagcctctgtccctgcgtccggaggcatgtagacccgcagctggtggggccgtgcatacccggggtcttgacttcgcctgcgatatctacatttgggcccctctggctggtacttgcggggtcctgctgctttcactcgtgatcactctttactgtaagcgcggtcggaagaagctgctgtacatctttaagcaacccttcatgaggcctgtgcagactactcaagaggaggacggctgttcatgccggttcccagaggaggaggaaggcggctgcgaactgcgcgtgaaattcagccgcagcgcagatgctccagcctacaagcaggggcagaaccagctctacaacgaactcaatcttggtcggagagaggagtacgacgtgctggacaagcggagaggacgggacccagaaatgggcgggaagccgcgcagaaagaatccccaagagggcctgtacaacgagctccaaaaggataagatggcagaagcctatagcgagattggtatgaaaggggaacgcagaagaggcaaaggccacgacggactgtaccagggactcagcaccgccaccaaggacacctatgacgctcttcacatgcaggccctgccgcctcgg

SEQ ID NO: 238 - protein, 247 aa, synthetic construct
  REGION 1..247: note = source = /note="Description of Artificial Sequence: Synthetic polypeptide"
QVQLVQSGAEVKKPGASVKVSCKASGYTFTGYYMHWVRQAPGQGLEWMGWINPNSGGTNYAQKFQGRVTMTRDTSISTAYMELSRLRSDDTAVYYCARDYWGYYGSGTLDYWGQGTLVTVSSGGGGSGGGGSGGGGSQSALTQPGSVSGSPGQSITISCTGTSSDVGGYNYVSWYQQHPGKAPKLIIYDVSSRPSGVSNRFSGSQSGNTASLTISGLQAEDEADYSCSSYAGSNTLVFGTGTKVTVL

SEQ ID NO: 239 - DNA, 741 bp, synthetic construct
  misc_feature 1..741: note = source = /note="Description of Artificial Sequence: Synthetic polynucleotide"
  source 1..741: mol_type = other DNA
caagtccaactcgtccagtccggtgcagaagtcaagaagccaggagcgtccgtgaaagtgtcctgcaaagcctcgggctacaccttcaccggatactacatgcactgggtgcgccaggctcccggacaaggattggagtggatgggttggatcaacccgaactccggcggaaccaactacgcccagaagttccagggacgcgtgactatgactcgggacacgtccatcagcactgcctacatggaactgagccggcttagatcagacgacaccgccgtgtactactgcgcccgcgattactggggctactacggaagcggaaccctcgactactggggacagggaactctcgtgactgtgtcgagcggtggaggcggctccggcggagggggttccggtggtggaggctcccagtccgcgctgacccagcctgggtcggtgtccggctcacctggccaatccatcaccatttcctgcaccggcacttcctccgacgtgggagggtacaactacgtgtcgtggtaccagcagcatccgggaaaggcccccaagctgatcatctacgatgtgtcgtcccggccgagcggagtgtcaaacaggtttagcgggagccagtccgggaatactgcctcgctgacaattagcgggctgcaggctgaggacgaggccgattattcgtgttcctcatatgcgggctctaacaccctggtgttcggcaccgggaccaaggtcaccgtgctg

SEQ ID NO: 240 - DNA, 834 bp, synthetic construct
  misc_feature 1..834: note = source = /note="Description of Artificial Sequence: Synthetic polynucleotide"
  source 1..834: mol_type = other DNA
atggccctccctgtcaccgccctgctgcttccgctggctcttctgctccacgccgctcggccccaagtccaactcgtccagtccggtgcagaagtcaagaagccaggagcgtccgtgaaagtgtcctgcaaagcctcgggctacaccttcaccggatactacatgcactgggtgcgccaggctcccggacaaggattggagtggatgggttggatcaacccgaactccggcggaaccaactacgcccagaagttccagggacgcgtgactatgactcgggacacgtccatcagcactgcctacatggaactgagccggcttagatcagacgacaccgccgtgtactactgcgcccgcgattactggggctactacggaagcggaaccctcgactactggggacagggaactctcgtgactgtgtcgagcggtggaggcggctccggcggagggggttccggtggtggaggctcccagtccgcgctgacccagcctgggtcggtgtccggctcacctggccaatccatcaccatttcctgcaccggcacttcctccgacgtgggagggtacaactacgtgtcgtggtaccagcagcatccgggaaaggcccccaagctgatcatctacgatgtgtcgtcccggccgagcggagtgtcaaacaggtttagcgggagccagtccgggaatactgcctcgctgacaattagcgggctgcaggctgaggacgaggccgattattcgtgttcctcatatgcgggctctaacaccctggtgttcggcaccgggaccaaggtcaccgtgctgggatcgcaccaccatcaccatcatcatcac

SEQ ID NO: 241 - protein, 279 aa, synthetic construct
  REGION 1..279: note = source = /note="Description of Artificial Sequence: Synthetic polypeptide"
MALPVTALLLPLALLLHAARPQVQLVQSGAEVKKPGASVKVSCKASGYTFTGYYMHWVRQAPGQGLEWMGWINPNSGGTNYAQKFQGRVTMTRDTSISTAYMELSRLRSDDTAVYYCARDYWGYYGSGTLDYWGQGTLVTVSSGGGGSGGGGSGGGGSQSALTQPGSVSGSPGQSITISCTGTSSDVGGYNYVSWYQQHPGKAPKLIIYDVSSRPSGVSNRFSGSQSGNTASLTISGLQAEDEADYSCSSYAGSNTLVFGTGTKVTVLGSHHHHHHHHH

SEQ ID NO: 242 - protein, 491 aa, synthetic construct
  REGION 1..491: note = source = /note="Description of Artificial Sequence: Synthetic polypeptide"
MALPVTALLLPLALLLHAARPQVQLVQSGAEVKKPGASVKVSCKASGYTFTGYYMHWVRQAPGQGLEWMGWINPNSGGTNYAQKFQGRVTMTRDTSISTAYMELSRLRSDDTAVYYCARDYWGYYGSGTLDYWGQGTLVTVSSGGGGSGGGGSGGGGSQSALTQPGSVSGSPGQSITISCTGTSSDVGGYNYVSWYQQHPGKAPKLIIYDVSSRPSGVSNRFSGSQSGNTASLTISGLQAEDEADYSCSSYAGSNTLVFGTGTKVTVLTTTPAPRPPTPAPTIASQPLSLRPEACRPAAGGAVHTRGLDFACDIYIWAPLAGTCGVLLLSLVITLYCKRGRKKLLYIFKQPFMRPVQTTQEEDGCSCRFPEEEEGGCELRVKFSRSADAPAYKQGQNQLYNELNLGRREEYDVLDKRRGRDPEMGGKPRRKNPQEGLYNELQKDKMAEAYSEIGMKGERRRGKGHDGLYQGLSTATKDTYDALHMQALPPR

SEQ ID NO: 243 - DNA, 1473 bp, synthetic construct
  misc_feature 1..1473: note = source = /note="Description of Artificial Sequence: Synthetic polynucleotide"
  source 1..1473: mol_type = other DNA
atggccctccctgtcaccgccctgctgcttccgctggctcttctgctccacgccgctcggccccaagtccaactcgtccagtccggtgcagaagtcaagaagccaggagcgtccgtgaaagtgtcctgcaaagcctcgggctacaccttcaccggatactacatgcactgggtgcgccaggctcccggacaaggattggagtggatgggttggatcaacccgaactccggcggaaccaactacgcccagaagttccagggacgcgtgactatgactcgggacacgtccatcagcactgcctacatggaactgagccggcttagatcagacgacaccgccgtgtactactgcgcccgcgattactggggctactacggaagcggaaccctcgactactggggacagggaactctcgtgactgtgtcgagcggtggaggcggctccggcggagggggttccggtggtggaggctcccagtccgcgctgacccagcctgggtcggtgtccggctcacctggccaatccatcaccatttcctgcaccggcacttcctccgacgtgggagggtacaactacgtgtcgtggtaccagcagcatccgggaaaggcccccaagctgatcatctacgatgtgtcgtcccggccgagcggagtgtcaaacaggtttagcgggagccagtccgggaatactgcctcgctgacaattagcgggctgcaggctgaggacgaggccgattattcgtgttcctcatatgcgggctctaacaccctggtgttcggcaccgggaccaaggtcaccgtgctgaccactaccccagcaccgaggccacccaccccggctcctaccatcgcctcccagcctctgtccctgcgtccggaggcatgtagacccgcagctggtggggccgtgcatacccggggtcttgacttcgcctgcgatatctacatttgggcccctctggctggtacttgcggggtcctgctgctttcactcgtgatcactctttactgtaagcgcggtcggaagaagctgctgtacatctttaagcaacccttcatgaggcctgtgcagactactcaagaggaggacggctgttcatgccggttcccagaggaggaggaaggcggctgcgaactgcgcgtgaaattcagccgcagcgcagatgctccagcctacaagcaggggcagaaccagctctacaacgaactcaatcttggtcggagagaggagtacgacgtgctggacaagcggagaggacgggacccagaaatgggcgggaagccgcgcagaaagaatccccaagagggcctgtacaacgagctccaaaaggataagatggcagaagcctatagcgagattggtatgaaaggggaacgcagaagaggcaaaggccacgacggactgtaccagggactcagcaccgccaccaaggacacctatgacgctcttcacatgcaggccctgccgcctcgg

SEQ ID NO: 244 - protein, 254 aa, synthetic construct
  REGION 1..254: note = source = /note="Description of Artificial Sequence: Synthetic polypeptide"
QVQLVQSGAEVKKPGASVKVSCKASGYTFTSYGISWVRQAPGQGLEWMGWISAYNGNTNYAQKLQGRVTMTTDTSTSTAYMELRSLRSDDTAVYYCARAGLALYSNYVPYYYYGMDVWGQGTTVTVSSGGGGSGGGGSGGGGSNFMLTQPHSVSESPGKTVTISCTRSSGSIASNYVQWYQQRPGSSPTTVIYEDNQRPSGVPDRFSGSIDSSSNSASLTISGLKTEDEADYYCQSYDSSNPWVFGGGTKLTVL

SEQ ID NO: 245 - DNA, 762 bp, synthetic construct
  misc_feature 1..762: note = source = /note="Description of Artificial Sequence: Synthetic polynucleotide"
  source 1..762: mol_type = other DNA
caagtccaactggtgcagtcgggagccgaagtcaagaagccgggggcctccgtcaaagtgtcctgcaaagccagcggctacactttcacctcctatgggatctcatgggtcagacaggctcccggccaaggactggaatggatgggttggatctccgcctacaacggcaacactaactacgcccagaagctgcaggggagagtgaccatgacaactgacacctcgacctcaaccgcgtacatggaactgcgcagccttaggtccgacgatacggcggtgtactattgtgcacgggccggcttggccctctactcgaactacgtgccctactactactacggaatggacgtctggggacagggaaccactgtgaccgtgtcctccgggggtggaggctcaggcggaggaggaagcggcgggggtggaagcaactttatgctgacccagcctcactcggtgtcggagagccctggaaagactgtgaccatctcctgcactcggagctcgggctccattgcgtcaaactacgtgcagtggtaccagcagcgccccggttcctcgccaaccaccgtgatctacgaggacaaccaacgcccgtccggggtgcctgaccggttctccggctccatcgattcctcttccaactccgcttccctgaccattagcggcctcaagaccgaggatgaagccgactactactgccagtcctacgactcaagcaatccgtgggtgttcggtggaggaactaagctgaccgtgctc

SEQ ID NO: 246 - DNA, 855 bp, synthetic construct
  misc_feature 1..855: note = source = /note="Description of Artificial Sequence: Synthetic polynucleotide"
  source 1..855: mol_type = other DNA
atggccctccctgtcaccgccctgctgcttccgctggctcttctgctccacgccgctcggccccaagtccaactggtgcagtcgggagccgaagtcaagaagccgggggcctccgtcaaagtgtcctgcaaagccagcggctacactttcacctcctatgggatctcatgggtcagacaggctcccggccaaggactggaatggatgggttggatctccgcctacaacggcaacactaactacgcccagaagctgcaggggagagtgaccatgacaactgacacctcgacctcaaccgcgtacatggaactgcgcagccttaggtccgacgatacggcggtgtactattgtgcacgggccggcttggccctctactcgaactacgtgccctactactactacggaatggacgtctggggacagggaaccactgtgaccgtgtcctccgggggtggaggctcaggcggaggaggaagcggcgggggtggaagcaactttatgctgacccagcctcactcggtgtcggagagccctggaaagactgtgaccatctcctgcactcggagctcgggctccattgcgtcaaactacgtgcagtggtaccagcagcgccccggttcctcgccaaccaccgtgatctacgaggacaaccaacgcccgtccggggtgcctgaccggttctccggctccatcgattcctcttccaactccgcttccctgaccattagcggcctcaagaccgaggatgaagccgactactactgccagtcctacgactcaagcaatccgtgggtgttcggtggaggaactaagctgaccgtgctcggatcgcaccaccatcaccatcatcatcac

SEQ ID NO: 247 - protein, 285 aa, synthetic construct
  REGION 1..285: note = source = /note="Description of Artificial Sequence: Synthetic polypeptide"
MALPVTALLLPLALLLHAARPQVQLVQSGAEVKKPGASVKVSCKASGYTFTSYGISWVRQAPGQGLEWMGWISAYNGNTNYAQKLQGRVTMTTDTSTSTAYMELRSLRSDDTAVYYCARAGLALYSNYVPYYYYGMDVWGQGTTVTVSSGGGGSGGGGSGGGGSNFMLTQPHSVSESPGKTVTISCTRSSGSIASNYVQWYQQRPGSSPTTVIYEDNQRPSGVPDRFSGSIDSSSNSASLTISGLKTEDEADYYCQSYDSSNPWVFGGGTKLTVLGSHHHHHHHH

SEQ ID NO: 248 - protein, 498 aa, synthetic construct
  REGION 1..498: note = source = /note="Description of Artificial Sequence: Synthetic polypeptide"
MALPVTALLLPLALLLHAARPQVQLVQSGAEVKKPGASVKVSCKASGYTFTSYGISWVRQAPGQGLEWMGWISAYNGNTNYAQKLQGRVTMTTDTSTSTAYMELRSLRSDDTAVYYCARAGLALYSNYVPYYYYGMDVWGQGTTVTVSSGGGGSGGGGSGGGGSNFMLTQPHSVSESPGKTVTISCTRSSGSIASNYVQWYQQRPGSSPTTVIYEDNQRPSGVPDRFSGSIDSSSNSASLTISGLKTEDEADYYCQSYDSSNPWVFGGGTKLTVLTTTPAPRPPTPAPTIASQPLSLRPEACRPAAGGAVHTRGLDFACDIYIWAPLAGTCGVLLLSLVITLYCKRGRKKLLYIFKQPFMRPVQTTQEEDGCSCRFPEEEEGGCELRVKFSRSADAPAYKQGQNQLYNELNLGRREEYDVLDKRRGRDPEMGGKPRRKNPQEGLYNELQKDKMAEAYSEIGMKGERRRGKGHDGLYQGLSTATKDTYDALHMQALPPR

SEQ ID NO: 249 - DNA, 1494 bp, synthetic construct
  misc_feature 1..1494: note = source = /note="Description of Artificial Sequence: Synthetic polynucleotide"
  source 1..1494: mol_type = other DNA
atggccctccctgtcaccgccctgctgcttccgctggctcttctgctccacgccgctcggccccaagtccaactggtgcagtcgggagccgaagtcaagaagccgggggcctccgtcaaagtgtcctgcaaagccagcggctacactttcacctcctatgggatctcatgggtcagacaggctcccggccaaggactggaatggatgggttggatctccgcctacaacggcaacactaactacgcccagaagctgcaggggagagtgaccatgacaactgacacctcgacctcaaccgcgtacatggaactgcgcagccttaggtccgacgatacggcggtgtactattgtgcacgggccggcttggccctctactcgaactacgtgccctactactactacggaatggacgtctggggacagggaaccactgtgaccgtgtcctccgggggtggaggctcaggcggaggaggaagcggcgggggtggaagcaactttatgctgacccagcctcactcggtgtcggagagccctggaaagactgtgaccatctcctgcactcggagctcgggctccattgcgtcaaactacgtgcagtggtaccagcagcgccccggttcctcgccaaccaccgtgatctacgaggacaaccaacgcccgtccggggtgcctgaccggttctccggctccatcgattcctcttccaactccgcttccctgaccattagcggcctcaagaccgaggatgaagccgactactactgccagtcctacgactcaagcaatccgtgggtgttcggtggaggaactaagctgaccgtgctcaccactaccccagcaccgaggccacccaccccggctcctaccatcgcctcccagcctctgtccctgcgtccggaggcatgtagacccgcagctggtggggccgtgcatacccggggtcttgacttcgcctgcgatatctacatttgggcccctctggctggtacttgcggggtcctgctgctttcactcgtgatcactctttactgtaagcgcggtcggaagaagctgctgtacatctttaagcaacccttcatgaggcctgtgcagactactcaagaggaggacggctgttcatgccggttcccagaggaggaggaaggcggctgcgaactgcgcgtgaaattcagccgcagcgcagatgctccagcctacaagcaggggcagaaccagctctacaacgaactcaatcttggtcggagagaggagtacgacgtgctggacaagcggagaggacgggacccagaaatgggcgggaagccgcgcagaaagaatccccaagagggcctgtacaacgagctccaaaaggataagatggcagaagcctatagcgagattggtatgaaaggggaacgcagaagaggcaaaggccacgacggactgtaccagggactcagcaccgccaccaaggacacctatgacgctcttcacatgcaggccctgccgcctcgg

SEQ ID NO: 250 - protein, 241 aa, synthetic construct
  REGION 1..241: note = source = /note="Description of Artificial Sequence: Synthetic polypeptide"
EVQLVESGGGLVKPGGSLRLSCVASGFTFSNAWMNWVRQAPGKGLEWVGRIKSKTDGGTADYAAPVKGRFTISRDDSKNTMYLQMNSLKTEDTGVYYCITGATDVWGQGTTVTVSSGGGGSGGGGSGGGGSSYVLTQPPSASGTPGQRVTISCSGSSSNIGSNYVYWYQQLPGTAPKLLIYRNNQRPSGVPDRFSGSKSGTSASLAISGLRSEDEADYYCAAWDDSLSGPVFGGGTKLTVL

SEQ ID NO: 251 - DNA, 723 bp, synthetic construct
  misc_feature 1..723: note = source = /note="Description of Artificial Sequence: Synthetic polynucleotide"
  source 1..723: mol_type = other DNA
gaagtgcagctcgtggaatcgggcggtggactggtcaagccaggaggttccctgcggctgtcctgcgtggcctccggtttcacattctccaacgcgtggatgaattgggtgcgccaagcccctggaaagggacttgaatgggtcggacggatcaagagcaaaaccgacggaggaactgccgattacgccgcacccgtgaagggcagattcaccatttcgcgggatgactcgaagaacaccatgtacctccagatgaactcgctcaagaccgaggataccggcgtctactactgcatcaccggcgctactgacgtctggggacagggaactaccgtgactgtgtcctccggcggaggcggaagcggaggagggggcagcgggggcgggggatcatcctacgtgctcactcagccgccttcagcctccggtaccccgggccagcgcgtgaccatttcatgctcgggctcctcctcaaacatcgggagcaactacgtgtactggtaccagcagctgcccggtactgcccccaagctgctgatctaccggaacaaccaacgcccgagcggagtgccggacagattctccgggtccaagtctgggacctccgctagcctggcgatctccggtctgaggagcgaggacgaggcagactactattgtgcggcctgggacgattccctgtcggggcctgtgtttggaggcggcacgaagttgaccgtgctg

SEQ ID NO: 252 - DNA, 816 bp, synthetic construct
  misc_feature 1..816: note = source = /note="Description of Artificial Sequence: Synthetic polynucleotide"
  source 1..816: mol_type = other DNA
atggccctccctgtcaccgccctgctgcttccgctggctcttctgctccacgccgctcggcccgaagtgcagctcgtggaatcgggcggtggactggtcaagccaggaggttccctgcggctgtcctgcgtggcctccggtttcacattctccaacgcgtggatgaattgggtgcgccaagcccctggaaagggacttgaatgggtcggacggatcaagagcaaaaccgacggaggaactgccgattacgccgcacccgtgaagggcagattcaccatttcgcgggatgactcgaagaacaccatgtacctccagatgaactcgctcaagaccgaggataccggcgtctactactgcatcaccggcgctactgacgtctggggacagggaactaccgtgactgtgtcctccggcggaggcggaagcggaggagggggcagcgggggcgggggatcatcctacgtgctcactcagccgccttcagcctccggtaccccgggccagcgcgtgaccatttcatgctcgggctcctcctcaaacatcgggagcaactacgtgtactggtaccagcagctgcccggtactgcccccaagctgctgatctaccggaacaaccaacgcccgagcggagtgccggacagattctccgggtccaagtctgggacctccgctagcctggcgatctccggtctgaggagcgaggacgaggcagactactattgtgcggcctgggacgattccctgtcggggcctgtgtttggaggcggcacgaagttgaccgtgctgggatcgcaccaccatcaccatcatcatcac

SEQ ID NO: 253 - protein, 272 aa, synthetic construct
  REGION 1..272: note = source = /note="Description of Artificial Sequence: Synthetic polypeptide"
MALPVTALLLPLALLLHAARPEVQLVESGGGLVKPGGSLRLSCVASGFTFSNAWMNWVRQAPGKGLEWVGRIKSKTDGGTADYAAPVKGRFTISRDDSKNTMYLQMNSLKTEDTGVYYCITGATDVWGQGTTVTVSSGGGGSGGGGSGGGGSSYVLTQPPSASGTPGQRVTISCSGSSSNIGSNYVYWYQQLPGTAPKLLIYRNNQRPSGVPDRFSGSKSGTSASLAISGLRSEDEADYYCAAWDDSLSGPVFGGGTKLTVLGSHHHHHHHH

SEQ ID NO: 254 - protein, 485 aa, synthetic construct
  REGION 1..485: note = source = /note="Description of Artificial Sequence: Synthetic polypeptide"
MALPVTALLLPLALLLHAARPEVQLVESGGGLVKPGGSLRLSCVASGFTFSNAWMNWVRQAPGKGLEWVGRIKSKTDGGTADYAAPVKGRFTISRDDSKNTMYLQMNSLKTEDTGVYYCITGATDVWGQGTTVTVSSGGGGSGGGGSGGGGSSYVLTQPPSASGTPGQRVTISCSGSSSNIGSNYVYWYQQLPGTAPKLLIYRNNQRPSGVPDRFSGSKSGTSASLAISGLRSEDEADYYCAAWDDSLSGPVFGGGTKLTVLTTTPAPRPPTPAPTIASQPLSLRPEACRPAAGGAVHTRGLDFACDIYIWAPLAGTCGVLLLSLVITLYCKRGRKKLLYIFKQPFMRPVQTTQEEDGCSCRFPEEEEGGCELRVKFSRSADAPAYKQGQNQLYNELNLGRREEYDVLDKRRGRDPEMGGKPRRKNPQEGLYNELQKDKMAEAYSEIGMKGERRRGKGHDGLYQGLSTATKDTYDALHMQALPPR

SEQ ID NO: 255 - DNA, 1455 bp, synthetic construct
  misc_feature 1..1455: note = source = /note="Description of Artificial Sequence: Synthetic polynucleotide"
  source 1..1455: mol_type = other DNA
atggccctccctgtcaccgccctgctgcttccgctggctcttctgctccacgccgctcggcccgaagtgcagctcgtggaatcgggcggtggactggtcaagccaggaggttccctgcggctgtcctgcgtggcctccggtttcacattctccaacgcgtggatgaattgggtgcgccaagcccctggaaagggacttgaatgggtcggacggatcaagagcaaaaccgacggaggaactgccgattacgccgcacccgtgaagggcagattcaccatttcgcgggatgactcgaagaacaccatgtacctccagatgaactcgctcaagaccgaggataccggcgtctactactgcatcaccggcgctactgacgtctggggacagggaactaccgtgactgtgtcctccggcggaggcggaagcggaggagggggcagcgggggcgggggatcatcctacgtgctcactcagccgccttcagcctccggtaccccgggccagcgcgtgaccatttcatgctcgggctcctcctcaaacatcgggagcaactacgtgtactggtaccagcagctgcccggtactgcccccaagctgctgatctaccggaacaaccaacgcccgagcggagtgccggacagattctccgggtccaagtctgggacctccgctagcctggcgatctccggtctgaggagcgaggacgaggcagactactattgtgcggcctgggacgattccctgtcggggcctgtgtttggaggcggcacgaagttgaccgtgctgaccactaccccagcaccgaggccacccaccccggctcctaccatcgcctcccagcctctgtccctgcgtccggaggcatgtagacccgcagctggtggggccgtgcatacccggggtcttgacttcgcctgcgatatctacatttgggcccctctggctggtacttgcggggtcctgctgctttcactcgtgatcactctttactgtaagcgcggtcggaagaagctgctgtacatctttaagcaacccttcatgaggcctgtgcagactactcaagaggaggacggctgttcatgccggttcccagaggaggaggaaggcggctgcgaactgcgcgtgaaattcagccgcagcgcagatgctccagcctacaagcaggggcagaaccagctctacaacgaactcaatcttggtcggagagaggagtacgacgtgctggacaagcggagaggacgggacccagaaatgggcgggaagccgcgcagaaagaatccccaagagggcctgtacaacgagctccaaaaggataagatggcagaagcctatagcgagattggtatgaaaggggaacgcagaagaggcaaaggccacgacggactgtaccagggactcagcaccgccaccaaggacacctatgacgctcttcacatgcaggccctgccgcctcgg

SEQ ID NO: 256 - protein, 254 aa, synthetic construct
  REGION 1..254: note = source = /note="Description of Artificial Sequence: Synthetic polypeptide"
EVQLQQSGPGLVKPSQTLSLTCAISGDSVLSNSDTWNWIRQSPSRGLEWLGRTYHRSTWYDDYASSVRGRVSINVDTSKNQYSLQLNAVTPEDTGVYYCARDRLQDGNSWSDAFDVWGQGTMVTVSSGGGGSGGGGSGGGGSQSALTQPASVSGSPGQSITISCTGTSSDVGGYNYVSWYQQHPGKAPKLMIYDVSNRPSGVSNRFSGSKSGNTASLTISGLQAEDEADYYCSSYTSSSTLVYVFGTGTKVTVL

SEQ ID NO: 257 - DNA, 762 bp, synthetic construct
  misc_feature 1..762: note = source = /note="Description of Artificial Sequence: Synthetic polynucleotide"
  source 1..762: mol_type = other DNA
gaagtgcagcttcagcagtctggtcccgggcttgtcaaaccatcgcagaccctgtccctgacttgcgcgatcagcggcgatagcgtgctgtcaaactcggacacctggaactggatcaggcagtccccttcccgcggactggaatggttgggccggacgtaccatcgctccacttggtacgacgactatgccagctccgtgagaggccgggtgtcgatcaacgtggatacttcaaagaaccagtactccctccaactcaatgctgtgaccccggaggacaccggagtgtactactgtgcccgggatagactgcaggacggaaactcatggagcgacgccttcgacgtgtggggacagggcaccatggtcaccgtgtccagcggtggaggaggctccggcggtggaggttcggggggaggagggagccaatcggctctgacccaaccggcctcagtcagcggttcgcccggacagtccattactattagctgcaccggaacctccagcgacgtgggcggctacaactatgtgtcgtggtaccagcagcacccggggaaggcccctaagctgatgatctacgacgtgtccaatcggccctccggggtgtccaaccgcttctccggctcgaagtccggcaacactgcatcactgacaatcagcggactgcaagccgaggacgaagcggattactactgctcctcctacacctcctcctccactctcgtctacgtgtttggaaccgggaccaaggtcaccgtgctg

SEQ ID NO: 258 - DNA, 855 bp, synthetic construct
  misc_feature 1..855: note = source = /note="Description of Artificial Sequence: Synthetic polynucleotide"
  source 1..855: mol_type = other DNA
atggccctccctgtcaccgccctgctgcttccgctggctcttctgctccacgccgctcggcccgaagtgcagcttcagcagtctggtcccgggcttgtcaaaccatcgcagaccctgtccctgacttgcgcgatcagcggcgatagcgtgctgtcaaactcggacacctggaactggatcaggcagtccccttcccgcggactggaatggttgggccggacgtaccatcgctccacttggtacgacgactatgccagctccgtgagaggccgggtgtcgatcaacgtggatacttcaaagaaccagtactccctccaactcaatgctgtgaccccggaggacaccggagtgtactactgtgcccgggatagactgcaggacggaaactcatggagcgacgccttcgacgtgtggggacagggcaccatggtcaccgtgtccagcggtggaggaggctccggcggtggaggttcggggggaggagggagccaatcggctctgacccaaccggcctcagtcagcggttcgcccggacagtccattactattagctgcaccggaacctccagcgacgtgggcggctacaactatgtgtcgtggtaccagcagcacccggggaaggcccctaagctgatgatctacgacgtgtccaatcggccctccggggtgtccaaccgcttctccggctcgaagtccggcaacactgcatcactgacaatcagcggactgcaagccgaggacgaagcggattactactgctcctcctacacctcctcctccactctcgtctacgtgtttggaaccgggaccaaggtcaccgtgctgggatcgcaccaccatcaccatcatcatcac

SEQ ID NO: 259 - protein, 285 aa, synthetic construct
  REGION 1..285: note = source = /note="Description of Artificial Sequence: Synthetic polypeptide"
MALPVTALLLPLALLLHAARPEVQLQQSGPGLVKPSQTLSLTCAISGDSVLSNSDTWNWIRQSPSRGLEWLGRTYHRSTWYDDYASSVRGRVSINVDTSKNQYSLQLNAVTPEDTGVYYCARDRLQDGNSWSDAFDVWGQGTMVTVSSGGGGSGGGGSGGGGSQSALTQPASVSGSPGQSITISCTGTSSDVGGYNYVSWYQQHPGKAPKLMIYDVSNRPSGVSNRFSGSKSGNTASLTISGLQAEDEADYYCSSYTSSSTLVYVFGTGTKVTVLGSHHHHHHHH

SEQ ID NO: 260 - protein, 498 aa, synthetic construct
  REGION 1..498: note = source = /note="Description of Artificial Sequence: Synthetic polypeptide"
MALPVTALLLPLALLLHAARPEVQLQQSGPGLVKPSQTLSLTCAISGDSVLSNSDTWNWIRQSPSRGLEWLGRTYHRSTWYDDYASSVRGRVSINVDTSKNQYSLQLNAVTPEDTGVYYCARDRLQDGNSWSDAFDVWGQGTMVTVSSGGGGSGGGGSGGGGSQSALTQPASVSGSPGQSITISCTGTSSDVGGYNYVSWYQQHPGKAPKLMIYDVSNRPSGVSNRFSGSKSGNTASLTISGLQAEDEADYYCSSYTSSSTLVYVFGTGTKVTVLTTTPAPRPPTPAPTIASQPLSLRPEACRPAAGGAVHTRGLDFACDIYIWAPLAGTCGVLLLSLVITLYCKRGRKKLLYIFKQPFMRPVQTTQEEDGCSCRFPEEEEGGCELRVKFSRSADAPAYKQGQNQLYNELNLGRREEYDVLDKRRGRDPEMGGKPRRKNPQEGLYNELQKDKMAEAYSEIGMKGERRRGKGHDGLYQGLSTATKDTYDALHMQALPPR

SEQ ID NO: 261 - DNA, 1494 bp, synthetic construct
  misc_feature 1..1494: note = source = /note="Description of Artificial Sequence: Synthetic polynucleotide"
  source 1..1494: mol_type = other DNA
atggccctccctgtcaccgccctgctgcttccgctggctcttctgctccacgccgctcggcccgaagtgcagcttcagcagtctggtcccgggcttgtcaaaccatcgcagaccctgtccctgacttgcgcgatcagcggcgatagcgtgctgtcaaactcggacacctggaactggatcaggcagtccccttcccgcggactggaatggttgggccggacgtaccatcgctccacttggtacgacgactatgccagctccgtgagaggccgggtgtcgatcaacgtggatacttcaaagaaccagtactccctccaactcaatgctgtgaccccggaggacaccggagtgtactactgtgcccgggatagactgcaggacggaaactcatggagcgacgccttcgacgtgtggggacagggcaccatggtcaccgtgtccagcggtggaggaggctccggcggtggaggttcggggggaggagggagccaatcggctctgacccaaccggcctcagtcagcggttcgcccggacagtccattactattagctgcaccggaacctccagcgacgtgggcggctacaactatgtgtcgtggtaccagcagcacccggggaaggcccctaagctgatgatctacgacgtgtccaatcggccctccggggtgtccaaccgcttctccggctcgaagtccggcaacactgcatcactgacaatcagcggactgcaagccgaggacgaagcggattactactgctcctcctacacctcctcctccactctcgtctacgtgtttggaaccgggaccaaggtcaccgtgctgaccactaccccagcaccgaggccacccaccccggctcctaccatcgcctcccagcctctgtccctgcgtccggaggcatgtagacccgcagctggtggggccgtgcatacccggggtcttgacttcgcctgcgatatctacatttgggcccctctggctggtacttgcggggtcctgctgctttcactcgtgatcactctttactgtaagcgcggtcggaagaagctgctgtacatctttaagcaacccttcatgaggcctgtgcagactactcaagaggaggacggctgttcatgccggttcccagaggaggaggaaggcggctgcgaactgcgcgtgaaattcagccgcagcgcagatgctccagcctacaagcaggggcagaaccagctctacaacgaactcaatcttggtcggagagaggagtacgacgtgctggacaagcggagaggacgggacccagaaatgggcgggaagccgcgcagaaagaatccccaagagggcctgtacaacgagctccaaaaggataagatggcagaagcctatagcgagattggtatgaaaggggaacgcagaagaggcaaaggccacgacggactgtaccagggactcagcaccgccaccaaggacacctatgacgctcttcacatgcaggccctgccgcctcgg

SEQ ID NO: 262 - protein, 249 aa, synthetic construct
  REGION 1..249: note = source = /note="Description of Artificial Sequence: Synthetic polypeptide"
EVQLQQSGPGLVKPSQTLSLTCAISGDSVSSNSAAWNWIRQSPSRGLEWLGRTYYRSKWYNDYAVSVKSRITINPDTSKNQFSLQLNSVTPEDTAVYYCAREESSSGWYEGNWFDPWGQGTLVTVSSGGGGSGGGGSGGGGSSSELTQDPAVSVALGQTVRITCQGDSLRSYYASWYQQKPGQAPVLVIYGKNHRPSGIPDRFSGSSSGDTDSLTITGAQAEDEADYYCHSRDSSGNHLFGGGTKLTVL

SEQ ID NO: 263 - DNA, 747 bp, synthetic construct
  misc_feature 1..747: note = source = /note="Description of Artificial Sequence: Synthetic polynucleotide"
  source 1..747: mol_type = other DNA
gaagtgcaacttcagcagtccggtcctggcttggtcaagccgtcacagaccctgtcgctgacttgtgctattagcggggactctgtgtcctcaaactccgccgcatggaactggattagacagtcgccctcccggggactggagtggctgggccgcacctactaccggtccaagtggtacaatgactacgccgtgtccgtgaagtcccgcattactatcaaccccgacacttcgaagaaccagttttcgctgcaactcaactccgtcacccctgaggataccgccgtgtactattgcgcccgggaagaatcctccagcggttggtacgaaggaaactggttcgacccatggggccagggcaccctggtcactgtgtcctcgggaggagggggcagcggtggcggaggaagcggaggaggaggctccagctccgagctcacccaggacccggcggtgtcagtggccctgggccaaacggtccgcatcacatgccagggggattccctgaggtcatactacgcgagctggtatcagcagaaacccggacaagcccctgtgctcgtgatctacgggaagaaccacaggccgagcggaatcccggatagattctccgggtcctcatcgggagacactgacagcctcaccatcaccggcgcgcaggccgaggacgaagctgattactactgccattcccgggactcgagcgggaaccaccttttcggtggcggaaccaagctgaccgtgctg

SEQ ID NO: 264 - DNA, 840 bp, synthetic construct
  misc_feature 1..840: note = source = /note="Description of Artificial Sequence: Synthetic polynucleotide"
  source 1..840: mol_type = other DNA
atggccctccctgtcaccgccctgctgcttccgctggctcttctgctccacgccgctcggcccgaagtgcaacttcagcagtccggtcctggcttggtcaagccgtcacagaccctgtcgctgacttgtgctattagcggggactctgtgtcctcaaactccgccgcatggaactggattagacagtcgccctcccggggactggagtggctgggccgcacctactaccggtccaagtggtacaatgactacgccgtgtccgtgaagtcccgcattactatcaaccccgacacttcgaagaaccagttttcgctgcaactcaactccgtcacccctgaggataccgccgtgtactattgcgcccgggaagaatcctccagcggttggtacgaaggaaactggttcgacccatggggccagggcaccctggtcactgtgtcctcgggaggagggggcagcggtggcggaggaagcggaggaggaggctccagctccgagctcacccaggacccggcggtgtcagtggccctgggccaaacggtccgcatcacatgccagggggattccctgaggtcatactacgcgagctggtatcagcagaaacccggacaagcccctgtgctcgtgatctacgggaagaaccacaggccgagcggaatcccggatagattctccgggtcctcatcgggagacactgacagcctcaccatcaccggcgcgcaggccgaggacgaagctgattactactgccattcccgggactcgagcgggaaccaccttttcggtggcggaaccaagctgaccgtgctgggatcgcaccaccatcaccatcatcatcac

SEQ ID NO: 265 - protein, 280 aa, synthetic construct
  REGION 1..280: note = source = /note="Description of Artificial Sequence: Synthetic polypeptide"
MALPVTALLLPLALLLHAARPEVQLQQSGPGLVKPSQTLSLTCAISGDSVSSNSAAWNWIRQSPSRGLEWLGRTYYRSKWYNDYAVSVKSRITINPDTSKNQFSLQLNSVTPEDTAVYYCAREESSSGWYEGNWFDPWGQGTLVTVSSGGGGSGGGGSGGGGSSSELTQDPAVSVALGQTVRITCQGDSLRSYYASWYQQKPGQAPVLVIYGKNHRPSGIPDRFSGSSSGDTDSLTITGAQAEDEADYYCHSRDSSGNHLFGGGTKLTVLGSHHHHHHHH

SEQ ID NO: 266 - protein, 493 aa, synthetic construct
  REGION 1..493: note = source = /note="Description of Artificial Sequence: Synthetic polypeptide"
MALPVTALLLPLALLLHAARPEVQLQQSGPGLVKPSQTLSLTCAISGDSVSSNSAAWNWIRQSPSRGLEWLGRTYYRSKWYNDYAVSVKSRITINPDTSKNQFSLQLNSVTPEDTAVYYCAREESSSGWYEGNWFDPWGQGTLVTVSSGGGGSGGGGSGGGGSSSELTQDPAVSVALGQTVRITCQGDSLRSYYASWYQQKPGQAPVLVIYGKNHRPSGIPDRFSGSSSGDTDSLTITGAQAEDEADYYCHSRDSSGNHLFGGGTKLTVLTTTPAPRPPTPAPTIASQPLSLRPEACRPAAGGAVHTRGLDFACDIYIWAPLAGTCGVLLLSLVITLYCKRGRKKLLYIFKQPFMRPVQTTQEEDGCSCRFPEEEEGGCELRVKFSRSADAPAYKQGQNQLYNELNLGRREEYDVLDKRRGRDPEMGGKPRRKNPQEGLYNELQKDKMAEAYSEIGMKGERRRGKGHDGLYQGLSTATKDTYDALHMQALPPR

SEQ ID NO: 267 - DNA, 1479 bp, synthetic construct
  misc_feature 1..1479: note = source = /note="Description of Artificial Sequence: Synthetic polynucleotide"
  source 1..1479: mol_type = other DNA
atggccctccctgtcaccgccctgctgcttccgctggctcttctgctccacgccgctcggcccgaagtgcaacttcagcagtccggtcctggcttggtcaagccgtcacagaccctgtcgctgacttgtgctattagcggggactctgtgtcctcaaactccgccgcatggaactggattagacagtcgccctcccggggactggagtggctgggccgcacctactaccggtccaagtggtacaatgactacgccgtgtccgtgaagtcccgcattactatcaaccccgacacttcgaagaaccagttttcgctgcaactcaactccgtcacccctgaggataccgccgtgtactattgcgcccgggaagaatcctccagcggttggtacgaaggaaactggttcgacccatggggccagggcaccctggtcactgtgtcctcgggaggagggggcagcggtggcggaggaagcggaggaggaggctccagctccgagctcacccaggacccggcggtgtcagtggccctgggccaaacggtccgcatcacatgccagggggattccctgaggtcatactacgcgagctggtatcagcagaaacccggacaagcccctgtgctcgtgatctacgggaagaaccacaggccgagcggaatcccggatagattctccgggtcctcatcgggagacactgacagcctcaccatcaccggcgcgcaggccgaggacgaagctgattactactgccattcccgggactcgagcgggaaccaccttttcggtggcggaaccaagctgaccgtgctgaccactaccccagcaccgaggccacccaccccggctcctaccatcgcctcccagcctctgtccctgcgtccggaggcatgtagacccgcagctggtggggccgtgcatacccggggtcttgacttcgcctgcgatatctacatttgggcccctctggctggtacttgcggggtcctgctgctttcactcgtgatcactctttactgtaagcgcggtcggaagaagctgctgtacatctttaagcaacccttcatgaggcctgtgcagactactcaagaggaggacggctgttcatgccggttcccagaggaggaggaaggcggctgcgaactgcgcgtgaaattcagccgcagcgcagatgctccagcctacaagcaggggcagaaccagctctacaacgaactcaatcttggtcggagagaggagtacgacgtgctggacaagcggagaggacgggacccagaaatgggcgggaagccgcgcagaaagaatccccaagagggcctgtacaacgagctccaaaaggataagatggcagaagcctatagcgagattggtatgaaaggggaacgcagaagaggcaaaggccacgacggactgtaccagggactcagcaccgccaccaaggacacctatgacgctcttcacatgcaggccctgccgcctcgg

SEQ ID NO: 268 - protein, 253 aa, synthetic construct
  REGION 1..253: note = source = /note="Description of Artificial Sequence: Synthetic polypeptide"
EVQLQQSGPGLVKPSQTLSLTCAISGDSVLSNSDTWNWIRQSPSRGLEWLGRTYHRSTWYDDYASSVRGRVSINVDTSKNQYSLQLNAVTPEDTGVYYCARDRLQDGNSWSDAFDVWGQGTMVTVSSGGGGSGGGGSGGGGSQSALTQPASASGSPGQSVTISCTGTSSDVGGYNYVSWYQQHPGKAPKLMIYDVSNRPSGVSNRFSGSKSGNTASLTISGLQAEDEADYYCSSYTSSSTLYVFGTGTQLTVL

SEQ ID NO: 269 - DNA, 759 bp, synthetic construct
  misc_feature 1..759: note = source = /note="Description of Artificial Sequence: Synthetic polynucleotide"
  source 1..759: mol_type = other DNA
gaagtgcagctgcagcagagcggaccgggcctggtcaaaccctcccaaaccctgtccctcacttgcgcgatctccggggactccgtgctctcgaactccgacacctggaactggattcggcagagcccatcgaggggcctggaatggctgggaagaacctaccaccggtccacttggtacgatgactacgcgagctcagtgcgcggacgcgtgtcgattaacgtggacacctccaagaaccagtacagcttgcaactgaacgccgtgacccctgaggacaccggagtgtactattgcgcccgggatagacttcaggacggaaacagctggtccgacgcctttgacgtctggggacagggcaccatggtcactgtgtcctcgggtggcggggggtccggtggaggaggttcaggcggaggcggctcacagtcagcactgacgcagccggcttccgcttccgggagccctggacagagcgtgaccatctcgtgtaccgggacttccagcgatgtcggcgggtacaactacgtgtcttggtaccaacagcatccgggaaaggcccccaagctcatgatctacgacgtgtcaaaccggcccagcggagtgtccaatcgcttctccggctccaagtcgggcaatactgcctcgctgactatcagcggtctgcaagccgaagatgaggccgactattactgctcctcctacacctcgtcctccacactctacgtgttcggaaccggtactcagctgaccgtgctt

SEQ ID NO: 270 - DNA, 852 bp, synthetic construct
  misc_feature 1..852: note = source = /note="Description of Artificial Sequence: Synthetic polynucleotide"
  source 1..852: mol_type = other DNA
atggccctccctgtcaccgccctgctgcttccgctggctcttctgctccacgccgctcggcccgaagtgcagctgcagcagagcggaccgggcctggtcaaaccctcccaaaccctgtccctcacttgcgcgatctccggggactccgtgctctcgaactccgacacctggaactggattcggcagagcccatcgaggggcctggaatggctgggaagaacctaccaccggtccacttggtacgatgactacgcgagctcagtgcgcggacgcgtgtcgattaacgtggacacctccaagaaccagtacagcttgcaactgaacgccgtgacccctgaggacaccggagtgtactattgcgcccgggatagacttcaggacggaaacagctggtccgacgcctttgacgtctggggacagggcaccatggtcactgtgtcctcgggtggcggggggtccggtggaggaggttcaggcggaggcggctcacagtcagcactgacgcagccggcttccgcttccgggagccctggacagagcgtgaccatctcgtgtaccgggacttccagcgatgtcggcgggtacaactacgtgtcttggtaccaacagcatccgggaaaggcccccaagctcatgatctacgacgtgtcaaaccggcccagcggagtgtccaatcgcttctccggctccaagtcgggcaatactgcctcgctgactatcagcggtctgcaagccgaagatgaggccgactattactgctcctcctacacctcgtcctccacactctacgtgttcggaaccggtactcagctgaccgtgcttggatcgcaccaccatcaccatcatcatcac

SEQ ID NO: 271 - protein, 284 aa, synthetic construct
  REGION 1..284: note = source = /note="Description of Artificial Sequence: Synthetic polypeptide"
MALPVTALLLPLALLLHAARPEVQLQQSGPGLVKPSQTLSLTCAISGDSVLSNSDTWNWIRQSPSRGLEWLGRTYHRSTWYDDYASSVRGRVSINVDTSKNQYSLQLNAVTPEDTGVYYCARDRLQDGNSWSDAFDVWGQGTMVTVSSGGGGSGGGGSGGGGSQSALTQPASASGSPGQSVTISCTGTSSDVGGYNYVSWYQQHPGKAPKLMIYDVSNRPSGVSNRFSGSKSGNTASLTISGLQAEDEADYYCSSYTSSSTLYVFGTGTQLTVLGSHHHHHHHH

SEQ ID NO: 272 - protein, 497 aa, synthetic construct
  REGION 1..497: note = source = /note="Description of Artificial Sequence: Synthetic polypeptide"
MALPVTALLLPLALLLHAARPEVQLQQSGPGLVKPSQTLSLTCAISGDSVLSNSDTWNWIRQSPSRGLEWLGRTYHRSTWYDDYASSVRGRVSINVDTSKNQYSLQLNAVTPEDTGVYYCARDRLQDGNSWSDAFDVWGQGTMVTVSSGGGGSGGGGSGGGGSQSALTQPASASGSPGQSVTISCTGTSSDVGGYNYVSWYQQHPGKAPKLMIYDVSNRPSGVSNRFSGSKSGNTASLTISGLQAEDEADYYCSSYTSSSTLYVFGTGTQLTVLTTTPAPRPPTPAPTIASQPLSLRPEACRPAAGGAVHTRGLDFACDIYIWAPLAGTCGVLLLSLVITLYCKRGRKKLLYIFKQPFMRPVQTTQEEDGCSCRFPEEEEGGCELRVKFSRSADAPAYKQGQNQLYNELNLGRREEYDVLDKRRGRDPEMGGKPRRKNPQEGLYNELQKDKMAEAYSEIGMKGERRRGKGHDGLYQGLSTATKDTYDALHMQALPPR

SEQ ID NO: 273 - DNA, 1491 bp, synthetic construct
  misc_feature 1..1491: note = source = /note="Description of Artificial Sequence: Synthetic polynucleotide"
  source 1..1491: mol_type = other DNA
atggccctccctgtcaccgccctgctgcttccgctggctcttctgctccacgccgctcggcccgaagtgcagctgcagcagagcggaccgggcctggtcaaaccctcccaaaccctgtccctcacttgcgcgatctccggggactccgtgctctcgaactccgacacctggaactggattcggcagagcccatcgaggggcctggaatggctgggaagaacctaccaccggtccacttggtacgatgactacgcgagctcagtgcgcggacgcgtgtcgattaacgtggacacctccaagaaccagtacagcttgcaactgaacgccgtgacccctgaggacaccggagtgtactattgcgcccgggatagacttcaggacggaaacagctggtccgacgcctttgacgtctggggacagggcaccatggtcactgtgtcctcgggtggcggggggtccggtggaggaggttcaggcggaggcggctcacagtcagcactgacgcagccggcttccgcttccgggagccctggacagagcgtgaccatctcgtgtaccgggacttccagcgatgtcggcgggtacaactacgtgtcttggtaccaacagcatccgggaaaggcccccaagctcatgatctacgacgtgtcaaaccggcccagcggagtgtccaatcgcttctccggctccaagtcgggcaatactgcctcgctgactatcagcggtctgcaagccgaagatgaggccgactattactgctcctcctacacctcgtcctccacactctacgtgttcggaaccggtactcagctgaccgtgcttaccactaccccagcaccgaggccacccaccccggctcctaccatcgcctcccagcctctgtccctgcgtccggaggcatgtagacccgcagctggtggggccgtgcatacccggggtcttgacttcgcctgcgatatctacatttgggcccctctggctggtacttgcggggtcctgctgctttcactcgtgatcactctttactgtaagcgcggtcggaagaagctgctgtacatctttaagcaacccttcatgaggcctgtgcagactactcaagaggaggacggctgttcatgccggttcccagaggaggaggaaggcggctgcgaactgcgcgtgaaattcagccgcagcgcagatgctccagcctacaagcaggggcagaaccagctctacaacgaactcaatcttggtcggagagaggagtacgacgtgctggacaagcggagaggacgggacccagaaatgggcgggaagccgcgcagaaagaatccccaagagggcctgtacaacgagctccaaaaggataagatggcagaagcctatagcgagattggtatgaaaggggaacgcagaagaggcaaaggccacgacggactgtaccagggactcagcaccgccaccaaggacacctatgacgctcttcacatgcaggccctgccgcctcgg

SEQ ID NO: 274 - protein, 245 aa, synthetic construct
  REGION 1..245: note = source = /note="Description of Artificial Sequence: Synthetic polypeptide"
QVQLQESGPGLVKPSETLSLTCTVSGGSISSSSYYWGWIRQPPGKGLEWIGSIYYSGSTYYNPSLKSRVTISVDTSKNQFSLKLSSVTAADTAVYYCARGRMDTAMAQIWGQGTMVTVSSGDGGSGGGGSGGGGSNFMLTQPHSVSESPGKTVTIPCTGSSGSFASSYVQWYQQRPGSAPATVIYEDNQRPSGVPDRFSGSVDSSSNSASLTISGLKTEDEAVYYCQSYDGATWVFGGGTKLTVL

SEQ ID NO: 275 - DNA, 735 bp, synthetic construct
  misc_feature 1..735: note = source = /note="Description of Artificial Sequence: Synthetic polynucleotide"
  source 1..735: mol_type = other DNA
caagtgcagctccaagaatcaggtcccggcctcgtgaagccttccgaaaccctctcccttacttgtaccgtgtccgggggaagcatctcgagcagctcctattactggggatggatcaggcagcctcccggaaagggactggagtggattggctccatctactactcggggtccacctactacaacccgtcactgaagtcccgcgtgaccatctcggtggatacctccaagaaccagttcagcctgaagctgtcctccgtgactgccgccgacactgccgtgtactactgcgcgcggggtcggatggacacagcgatggctcagatttggggacagggcaccatggtcactgtgtcctccggggatggaggctccgggggcggaggatctggtggcggggggtcgaacttcatgttgacccagccacactccgtgtcggaaagcccaggaaagaccgtcaccatcccttgcactggaagcagcggttcgttcgcatcaagctacgtgcagtggtaccagcaaagacccggcagcgctccggccaccgtcatctatgaggacaatcagcggccgtccggcgtgccggaccgcttcagcggatcggtggactcatcctcaaactccgcctccctgacgatttccggtctgaaaaccgaggacgaagccgtctactactgccagtcgtacgatggcgccacttgggtgtttggaggaggcaccaagctgaccgtgctg

SEQ ID NO: 276 - DNA, 828 bp, synthetic construct
  misc_feature 1..828: note = source = /note="Description of Artificial Sequence: Synthetic polynucleotide"
  source 1..828: mol_type = other DNA
atggccctccctgtcaccgccctgctgcttccgctggctcttctgctccacgccgctcggccccaagtgcagctccaagaatcaggtcccggcctcgtgaagccttccgaaaccctctcccttacttgtaccgtgtccgggggaagcatctcgagcagctcctattactggggatggatcaggcagcctcccggaaagggactggagtggattggctccatctactactcggggtccacctactacaacccgtcactgaagtcccgcgtgaccatctcggtggatacctccaagaaccagttcagcctgaagctgtcctccgtgactgccgccgacactgccgtgtactactgcgcgcggggtcggatggacacagcgatggctcagatttggggacagggcaccatggtcactgtgtcctccggggatggaggctccgggggcggaggatctggtggcggggggtcgaacttcatgttgacccagccacactccgtgtcggaaagcccaggaaagaccgtcaccatcccttgcactggaagcagcggttcgttcgcatcaagctacgtgcagtggtaccagcaaagacccggcagcgctccggccaccgtcatctatgaggacaatcagcggccgtccggcgtgccggaccgcttcagcggatcggtggactcatcctcaaactccgcctccctgacgatttccggtctgaaaaccgaggacgaagccgtctactactgccagtcgtacgatggcgccacttgggtgtttggaggaggcaccaagctgaccgtgctgggatcgcaccaccatcaccatcatcatcac

SEQ ID NO: 277 - protein, 276 aa, synthetic construct
  REGION 1..276: note = source = /note="Description of Artificial Sequence: Synthetic polypeptide"
MALPVTALLLPLALLLHAARPQVQLQESGPGLVKPSETLSLTCTVSGGSISSSSYYWGWIRQPPGKGLEWIGSIYYSGSTYYNPSLKSRVTISVDTSKNQFSLKLSSVTAADTAVYYCARGRMDTAMAQIWGQGTMVTVSSGDGGSGGGGSGGGGSNFMLTQPHSVSESPGKTVTIPCTGSSGSFASSYVQWYQQRPGSAPATVIYEDNQRPSGVPDRFSGSVDSSSNSASLTISGLKTEDEAVYYCQSYDGATWVFGGGTKLTVLGSHHHHHHHH

SEQ ID NO: 278 - protein, 489 aa, synthetic construct
  REGION 1..489: note = source = /note="Description of Artificial Sequence: Synthetic polypeptide"
MALPVTALLLPLALLLHAARPQVQLQESGPGLVKPSETLSLTCTVSGGSISSSSYYWGWIRQPPGKGLEWIGSIYYSGSTYYNPSLKSRVTISVDTSKNQFSLKLSSVTAADTAVYYCARGRMDTAMAQIWGQGTMVTVSSGDGGSGGGGSGGGGSNFMLTQPHSVSESPGKTVTIPCTGSSGSFASSYVQWYQQRPGSAPATVIYEDNQRPSGVPDRFSGSVDSSSNSASLTISGLKTEDEAVYYCQSYDGATWVFGGGTKLTVLTTTPAPRPPTPAPTIASQPLSLRPEACRPAAGGAVHTRGLDFACDIYIWAPLAGTCGVLLLSLVITLYCKRGRKKLLYIFKQPFMRPVQTTQEEDGCSCRFPEEEEGGCELRVKFSRSADAPAYKQGQNQLYNELNLGRREEYDVLDKRRGRDPEMGGKPRRKNPQEGLYNELQKDKMAEAYSEIGMKGERRRGKGHDGLYQGLSTATKDTYDALHMQALPPR

SEQ ID NO: 279 - DNA, 1467 bp, synthetic construct
  misc_feature 1..1467: note = source = /note="Description of Artificial Sequence: Synthetic polynucleotide"
  source 1..1467: mol_type = other DNA
atggccctccctgtcaccgccctgctgcttccgctggctcttctgctccacgccgctcggccccaagtgcagctccaagaatcaggtcccggcctcgtgaagccttccgaaaccctctcccttacttgtaccgtgtccgggggaagcatctcgagcagctcctattactggggatggatcaggcagcctcccggaaagggactggagtggattggctccatctactactcggggtccacctactacaacccgtcactgaagtcccgcgtgaccatctcggtggatacctccaagaaccagttcagcctgaagctgtcctccgtgactgccgccgacactgccgtgtactactgcgcgcggggtcggatggacacagcgatggctcagatttggggacagggcaccatggtcactgtgtcctccggggatggaggctccgggggcggaggatctggtggcggggggtcgaacttcatgttgacccagccacactccgtgtcggaaagcccaggaaagaccgtcaccatcccttgcactggaagcagcggttcgttcgcatcaagctacgtgcagtggtaccagcaaagacccggcagcgctccggccaccgtcatctatgaggacaatcagcggccgtccggcgtgccggaccgcttcagcggatcggtggactcatcctcaaactccgcctccctgacgatttccggtctgaaaaccgaggacgaagccgtctactactgccagtcgtacgatggcgccacttgggtgtttggaggaggcaccaagctgaccgtgctgaccactaccccagcaccgaggccacccaccccggctcctaccatcgcctcccagcctctgtccctgcgtccggaggcatgtagacccgcagctggtggggccgtgcatacccggggtcttgacttcgcctgcgatatctacatttgggcccctctggctggtacttgcggggtcctgctgctttcactcgtgatcactctttactgtaagcgcggtcggaagaagctgctgtacatctttaagcaacccttcatgaggcctgtgcagactactcaagaggaggacggctgttcatgccggttcccagaggaggaggaaggcggctgcgaactgcgcgtgaaattcagccgcagcgcagatgctccagcctacaagcaggggcagaaccagctctacaacgaactcaatcttggtcggagagaggagtacgacgtgctggacaagcggagaggacgggacccagaaatgggcgggaagccgcgcagaaagaatccccaagagggcctgtacaacgagctccaaaaggataagatggcagaagcctatagcgagattggtatgaaaggggaacgcagaagaggcaaaggccacgacggactgtaccagggactcagcaccgccaccaaggacacctatgacgctcttcacatgcaggccctgccgcctcgg

SEQ ID NO: 280 - protein, 242 aa, synthetic construct
  REGION 1..242: note = source = /note="Description of Artificial Sequence: Synthetic polypeptide"
QVQLVQSGAEVKKPGASVKVSCKASGYTFTSYYMHWVRQAPGQGLEWMGIINPSGGSTSYAQKFQGRVTMTRDTSTSTVYMELSSLRSEDTAVYYCARDLDVSLDIWGQGTMVTVSSGGGGSGGGGSGGGGSQSALTQPASVSGSPGQSITISCSGTSSDVGGYNSVSWYQQYPGKAPKLMIYDVNNRPSGVSSRFSGSKSGNTASLTISGLQAEDEADYYCSSYTSSSTLFFGAGTKVTVL

SEQ ID NO: 281 - DNA, 726 bp, synthetic construct
  misc_feature 1..726: note = source = /note="Description of Artificial Sequence: Synthetic polynucleotide"
  source 1..726: mol_type = other DNA
caagtgcaacttgtccagagcggagcagaagtcaagaaaccaggagcaagcgtgaaggtgtcctgcaaagcgtcaggctacactttcacctcctactatatgcactgggtccgccaggcccctggacaaggcctggaatggatgggtatcatcaacccgtccggtggaagcaccagctacgcccagaagtttcagggaagagtgaccatgactcgggacacttcaacctcgacggtgtacatggagctgtcctccctgcggtcggaggacaccgccgtgtactactgcgcgagggatctcgatgtgtccctggacatttggggacagggcaccatggtcaccgtgtcctccggggggggcggatcaggcggcggaggttcagggggcgggggctcccagtccgcgctgactcagccggctagcgtgtccggctcgccgggacagagcattaccatctcgtgctcgggtaccagctccgacgtgggaggctataactccgtgtcctggtaccagcagtaccccggaaaggcccccaagctgatgatctacgacgtgaacaatcgcccttctggggtgtcctctcggttctccgggtcaaagagcggaaacaccgcctccctgaccatctcgggactccaagctgaggatgaagccgactactactgttcgagctacacctcctcctccactctcttcttcggtgccggaactaaggtcacagtgttg

SEQ ID NO: 282 - DNA, 819 bp, synthetic construct
  misc_feature 1..819: note = source = /note="Description of Artificial Sequence: Synthetic polynucleotide"
  source 1..819: mol_type = other DNA
atggccctccctgtcaccgccctgctgcttccgctggctcttctgctccacgccgctcggccccaagtgcaacttgtccagagcggagcagaagtcaagaaaccaggagcaagcgtgaaggtgtcctgcaaagcgtcaggctacactttcacctcctactatatgcactgggtccgccaggcccctggacaaggcctggaatggatgggtatcatcaacccgtccggtggaagcaccagctacgcccagaagtttcagggaagagtgaccatgactcgggacacttcaacctcgacggtgtacatggagctgtcctccctgcggtcggaggacaccgccgtgtactactgcgcgagggatctcgatgtgtccctggacatttggggacagggcaccatggtcaccgtgtcctccggggggggcggatcaggcggcggaggttcagggggcgggggctcccagtccgcgctgactcagccggctagcgtgtccggctcgccgggacagagcattaccatctcgtgctcgggtaccagctccgacgtgggaggctataactccgtgtcctggtaccagcagtaccccggaaaggcccccaagctgatgatctacgacgtgaacaatcgcccttctggggtgtcctctcggttctccgggtcaaagagcggaaacaccgcctccctgaccatctcgggactccaagctgaggatgaagccgactactactgttcgagctacacctcctcctccactctcttcttcggtgccggaactaaggtcacagtgttgggatcgcaccaccatcaccatcatcatcac

SEQ ID NO: 283 - protein, 273 aa, synthetic construct
  REGION 1..273: note = source = /note="Description of Artificial Sequence: Synthetic polypeptide"
MALPVTALLLPLALLLHAARPQVQLVQSGAEVKKPGASVKVSCKASGYTFTSYYMHWVRQAPGQGLEWMGIINPSGGSTSYAQKFQGRVTMTRDTSTSTVYMELSSLRSEDTAVYYCARDLDVSLDIWGQGTMVTVSSGGGGSGGGGSGGGGSQSALTQPASVSGSPGQSITISCSGTSSDVGGYNSVSWYQQYPGKAPKLMIYDVNNRPSGVSSRFSGSKSGNTASLTISGLQAEDEADYYCSSYTSSSTLFFGAGTKVTVLGSHHHHHHHH

SEQ ID NO: 284 - protein, 486 aa, synthetic construct
  REGION 1..486: note = source = /note="Description of Artificial Sequence: Synthetic polypeptide"
MALPVTALLLPLALLLHAARPQVQLVQSGAEVKKPGASVKVSCKASGYTFTSYYMHWVRQAPGQGLEWMGIINPSGGSTSYAQKFQGRVTMTRDTSTSTVYMELSSLRSEDTAVYYCARDLDVSLDIWGQGTMVTVSSGGGGSGGGGSGGGGSQSALTQPASVSGSPGQSITISCSGTSSDVGGYNSVSWYQQYPGKAPKLMIYDVNNRPSGVSSRFSGSKSGNTASLTISGLQAEDEADYYCSSYTSSSTLFFGAGTKVTVLTTTPAPRPPTPAPTIASQPLSLRPEACRPAAGGAVHTRGLDFACDIYIWAPLAGTCGVLLLSLVITLYCKRGRKKLLYIFKQPFMRPVQTTQEEDGCSCRFPEEEEGGCELRVKFSRSADAPAYKQGQNQLYNELNLGRREEYDVLDKRRGRDPEMGGKPRRKNPQEGLYNELQKDKMAEAYSEIGMKGERRRGKGHDGLYQGLSTATKDTYDALHMQALPPR

SEQ ID NO: 285 - DNA, 1458 bp, synthetic construct
  misc_feature 1..1458: note = source = /note="Description of Artificial Sequence: Synthetic polynucleotide"
  source 1..1458: mol_type = other DNA
atggccctccctgtcaccgccctgctgcttccgctggctcttctgctccacgccgctcggccccaagtgcaacttgtccagagcggagcagaagtcaagaaaccaggagcaagcgtgaaggtgtcctgcaaagcgtcaggctacactttcacctcctactatatgcactgggtccgccaggcccctggacaaggcctggaatggatgggtatcatcaacccgtccggtggaagcaccagctacgcccagaagtttcagggaagagtgaccatgactcgggacacttcaacctcgacggtgtacatggagctgtcctccctgcggtcggaggacaccgccgtgtactactgcgcgagggatctcgatgtgtccctggacatttggggacagggcaccatggtcaccgtgtcctccggggggggcggatcaggcggcggaggttcagggggcgggggctcccagtccgcgctgactcagccggctagcgtgtccggctcgccgggacagagcattaccatctcgtgctcgggtaccagctccgacgtgggaggctataactccgtgtcctggtaccagcagtaccccggaaaggcccccaagctgatgatctacgacgtgaacaatcgcccttctggggtgtcctctcggttctccgggtcaaagagcggaaacaccgcctccctgaccatctcgggactccaagctgaggatgaagccgactactactgttcgagctacacctcctcctccactctcttcttcggtgccggaactaaggtcacagtgttgaccactaccccagcaccgaggccacccaccccggctcctaccatcgcctcccagcctctgtccctgcgtccggaggcatgtagacccgcagctggtggggccgtgcatacccggggtcttgacttcgcctgcgatatctacatttgggcccctctggctggtacttgcggggtcctgctgctttcactcgtgatcactctttactgtaagcgcggtcggaagaagctgctgtacatctttaagcaacccttcatgaggcctgtgcagactactcaagaggaggacggctgttcatgccggttcccagaggaggaggaaggcggctgcgaactgcgcgtgaaattcagccgcagcgcagatgctccagcctacaagcaggggcagaaccagctctacaacgaactcaatcttggtcggagagaggagtacgacgtgctggacaagcggagaggacgggacccagaaatgggcgggaagccgcgcagaaagaatccccaagagggcctgtacaacgagctccaaaaggataagatggcagaagcctatagcgagattggtatgaaaggggaacgcagaagaggcaaaggccacgacggactgtaccagggactcagcaccgccaccaaggacacctatgacgctcttcacatgcaggccctgccgcctcgg

SEQ ID NO: 286 - protein, 247 aa, synthetic construct
  REGION 1..247: note = source = /note="Description of Artificial Sequence: Synthetic polypeptide"
EVQLVESGGGLVQPGGSLRLSCAASGFTFSSYAMHWVRQAPGKGLEYVSAISSNGGSTYYANSVKDRFTISRDNSKNTLYLQMGSLRAEDMAVYYCARVHSSGYYHPGPNDYWGQGTLVTVSSGGGGSGGGGSGGGGSSSELTQDPAVSVALGQTVRITCQGDSLRTYYATWYQQKPGQAPVLVFYDENNRPSGIPDRFSGSSSGNTASLTITGTQAEDEADYYCSSRDSSGNPSCVFGGGTKLTVL

SEQ ID NO: 287 - DNA, 741 bp, synthetic construct
  misc_feature 1..741: note = source = /note="Description of Artificial Sequence: Synthetic polynucleotide"
  source 1..741: mol_type = other DNA
gaagtgcagttggtggagagcggtggaggacttgtgcaacctggaggatcattgagactgtcgtgtgcggcctccggctttaccttctcgtcctacgctatgcattgggtccgccaggcccccgggaaaggactcgaatacgtcagcgccatctcctcaaacgggggatcaacctactacgccaattccgtgaaggatcggttcaccatctcccgggataacagcaagaacaccctgtatctgcaaatggggtccctgagggcagaggacatggccgtctactactgcgcgcgcgtgcacagctctggatactaccaccctggaccgaacgattactggggccagggcactctcgtgaccgtgtcctcggggggtggtggaagcggcggcggaggatcggggggaggcggctcctcgagcgaactgacacaggaccctgccgtgtccgtggctctgggtcagactgtgcgcattacgtgtcaaggagactccctgagaacttattacgcgacctggtaccagcagaagccgggacaggcaccggtgctggtgttctacgacgaaaacaaccggccatccgggattcccgaccggttctccggctcatcgagcggcaacactgcctccctgaccatcaccgggacccaggccgaggacgaggccgattactactgctcctcgcgggactcctccggcaacccctcctgcgtgttcggcggtggaaccaagctgactgtcctc

SEQ ID NO: 288 - DNA, 834 bp, synthetic construct
  misc_feature 1..834: note = source = /note="Description of Artificial Sequence: Synthetic polynucleotide"
  source 1..834: mol_type = other DNA
atggccctccctgtcaccgccctgctgcttccgctggctcttctgctccacgccgctcggcccgaagtgcagttggtggagagcggtggaggacttgtgcaacctggaggatcattgagactgtcgtgtgcggcctccggctttaccttctcgtcctacgctatgcattgggtccgccaggcccccgggaaaggactcgaatacgtcagcgccatctcctcaaacgggggatcaacctactacgccaattccgtgaaggatcggttcaccatctcccgggataacagcaagaacaccctgtatctgcaaatggggtccctgagggcagaggacatggccgtctactactgcgcgcgcgtgcacagctctggatactaccaccctggaccgaacgattactggggccagggcactctcgtgaccgtgtcctcggggggtggtggaagcggcggcggaggatcggggggaggcggctcctcgagcgaactgacacaggaccctgccgtgtccgtggctctgggtcagactgtgcgcattacgtgtcaaggagactccctgagaacttattacgcgacctggtaccagcagaagccgggacaggcaccggtgctggtgttctacgacgaaaacaaccggccatccgggattcccgaccggttctccggctcatcgagcggcaacactgcctccctgaccatcaccgggacccaggccgaggacgaggccgattactactgctcctcgcgggactcctccggcaacccctcctgcgtgttcggcggtggaaccaagctgactgtcctcggatcgcaccaccatcaccatcatcatcac

SEQ ID NO: 289 - protein, 278 aa, synthetic construct
  REGION 1..278: note = source = /note="Description of Artificial Sequence: Synthetic polypeptide"
MALPVTALLLPLALLLHAARPEVQLVESGGGLVQPGGSLRLSCAASGFTFSSYAMHWVRQAPGKGLEYVSAISSNGGSTYYANSVKDRFTISRDNSKNTLYLQMGSLRAEDMAVYYCARVHSSGYYHPGPNDYWGQGTLVTVSSGGGGSGGGGSGGGGSSSELTQDPAVSVALGQTVRITCQGDSLRTYYATWYQQKPGQAPVLVFYDENNRPSGIPDRFSGSSSGNTASLTITGTQAEDEADYYCSSRDSSGNPSCVFGGGTKLTVLGSHHHHHHHH

SEQ ID NO: 290 - protein, 491 aa, synthetic construct
  REGION 1..491: note = source = /note="Description of Artificial Sequence: Synthetic polypeptide"
MALPVTALLLPLALLLHAARPEVQLVESGGGLVQPGGSLRLSCAASGFTFSSYAMHWVRQAPGKGLEYVSAISSNGGSTYYANSVKDRFTISRDNSKNTLYLQMGSLRAEDMAVYYCARVHSSGYYHPGPNDYWGQGTLVTVSSGGGGSGGGGSGGGGSSSELTQDPAVSVALGQTVRITCQGDSLRTYYATWYQQKPGQAPVLVFYDENNRPSGIPDRFSGSSSGNTASLTITGTQAEDEADYYCSSRDSSGNPSCVFGGGTKLTVLTTTPAPRPPTPAPTIASQPLSLRPEACRPAAGGAVHTRGLDFACDIYIWAPLAGTCGVLLLSLVITLYCKRGRKKLLYIFKQPFMRPVQTTQEEDGCSCRFPEEEEGGCELRVKFSRSADAPAYKQGQNQLYNELNLGRREEYDVLDKRRGRDPEMGGKPRRKNPQEGLYNELQKDKMAEAYSEIGMKGERRRGKGHDGLYQGLSTATKDTYDALHMQALPPR

SEQ ID NO: 291 - DNA, 1473 bp, synthetic construct
  misc_feature 1..1473: note = source = /note="Description of Artificial Sequence: Synthetic polynucleotide"
  source 1..1473: mol_type = other DNA
atggccctccctgtcaccgccctgctgcttccgctggctcttctgctccacgccgctcggcccgaagtgcagttggtggagagcggtggaggacttgtgcaacctggaggatcattgagactgtcgtgtgcggcctccggctttaccttctcgtcctacgctatgcattgggtccgccaggcccccgggaaaggactcgaatacgtcagcgccatctcctcaaacgggggatcaacctactacgccaattccgtgaaggatcggttcaccatctcccgggataacagcaagaacaccctgtatctgcaaatggggtccctgagggcagaggacatggccgtctactactgcgcgcgcgtgcacagctctggatactaccaccctggaccgaacgattactggggccagggcactctcgtgaccgtgtcctcggggggtggtggaagcggcggcggaggatcggggggaggcggctcctcgagcgaactgacacaggaccctgccgtgtccgtggctctgggtcagactgtgcgcattacgtgtcaaggagactccctgagaacttattacgcgacctggtaccagcagaagccgggacaggcaccggtgctggtgttctacgacgaaaacaaccggccatccgggattcccgaccggttctccggctcatcgagcggcaacactgcctccctgaccatcaccgggacccaggccgaggacgaggccgattactactgctcctcgcgggactcctccggcaacccctcctgcgtgttcggcggtggaaccaagctgactgtcctcaccactaccccagcaccgaggccacccaccccggctcctaccatcgcctcccagcctctgtccctgcgtccggaggcatgtagacccgcagctggtggggccgtgcatacccggggtcttgacttcgcctgcgatatctacatttgggcccctctggctggtacttgcggggtcctgctgctttcactcgtgatcactctttactgtaagcgcggtcggaagaagctgctgtacatctttaagcaacccttcatgaggcctgtgcagactactcaagaggaggacggctgttcatgccggttcccagaggaggaggaaggcggctgcgaactgcgcgtgaaattcagccgcagcgcagatgctccagcctacaagcaggggcagaaccagctctacaacgaactcaatcttggtcggagagaggagtacgacgtgctggacaagcggagaggacgggacccagaaatgggcgggaagccgcgcagaaagaatccccaagagggcctgtacaacgagctccaaaaggataagatggcagaagcctatagcgagattggtatgaaaggggaacgcagaagaggcaaaggccacgacggactgtaccagggactcagcaccgccaccaaggacacctatgacgctcttcacatgcaggccctgccgcctcgg

SEQ ID NO: 292 - protein, 243 aa, synthetic construct
  REGION 1..243: note = source = /note="Description of Artificial Sequence: Synthetic polypeptide"
EVQLVESGAEVKKPGASVKVSCKASGYTFTSYYMHWVRQAPGQGLEWMGIINPSGGSTSYAQKFQGRVTMTRDTSTSTAYMELSSLRSEDTAVYYCAREAGVVAVDYWGQGTLVTVSSGGGGSGGGGSGGGGSQSALTQPASVSGSPGQSITISCTGTSSDVGGYNYVSWYQQHPGKAPKLMIYDVSNRPSGVSNRFSGSKSGNTASLTISGLQAEDEADYYCSSYTSSSTWVFGGGTKLTVL

SEQ ID NO: 293 - DNA, 729 bp, synthetic construct
  misc_feature 1..729: note = source = /note="Description of Artificial Sequence: Synthetic polynucleotide"
  source 1..729: mol_type = other DNA
gaagtgcaactcgtcgaatctggagcggaagtcaagaagcctggagcaagcgtgaaagtgtcctgtaaagcgtccggttacaccttcacttcgtattacatgcactgggtccgccaagctccgggacagggactggaatggatgggcatcatcaaccctagcggaggatcgacctcctacgcccaaaagttccagggcagagtgaccatgacccgggacaccagcacatcaactgcctacatggagctgtcatcactgaggtccgaggataccgccgtgtactattgcgcccgcgaggccggcgtggtggccgtcgactactggggacagggcactctcgtgaccgtgtcatcgggaggcggcggttccggggggggagggtcggggggcggaggctcccagtccgcactgacgcagccggcttccgtgtctggttcgcccggacagtccatcaccatttcctgcactggaaccagcagcgacgtgggcggttacaactacgtgtcatggtaccagcagcatcccggaaaggccccaaagcttatgatctacgacgtgtccaatcggccgtcgggcgtcagcaaccggttctccggctccaagtccgggaacactgccagcctgaccattagcgggctgcaggccgaggacgaagcggattactactgctcctcctacacttcctcctcgacctgggtgtttggtggaggcaccaagttgactgtgctg

SEQ ID NO: 294 - DNA, 822 bp, synthetic construct
  misc_feature 1..822: note = source = /note="Description of Artificial Sequence: Synthetic polynucleotide"
  source 1..822: mol_type = other DNA
atggccctccctgtcaccgccctgctgcttccgctggctcttctgctccacgccgctcggcccgaagtgcaactcgtcgaatctggagcggaagtcaagaagcctggagcaagcgtgaaagtgtcctgtaaagcgtccggttacaccttcacttcgtattacatgcactgggtccgccaagctccgggacagggactggaatggatgggcatcatcaaccctagcggaggatcgacctcctacgcccaaaagttccagggcagagtgaccatgacccgggacaccagcacatcaactgcctacatggagctgtcatcactgaggtccgaggataccgccgtgtactattgcgcccgcgaggccggcgtggtggccgtcgactactggggacagggcactctcgtgaccgtgtcatcgggaggcggcggttccggggggggagggtcggggggcggaggctcccagtccgcactgacgcagccggcttccgtgtctggttcgcccggacagtccatcaccatttcctgcactggaaccagcagcgacgtgggcggttacaactacgtgtcatggtaccagcagcatcccggaaaggccccaaagcttatgatctacgacgtgtccaatcggccgtcgggcgtcagcaaccggttctccggctccaagtccgggaacactgccagcctgaccattagcgggctgcaggccgaggacgaagcggattactactgctcctcctacacttcctcctcgacctgggtgtttggtggaggcaccaagttgactgtgctgggatcgcaccaccatcaccatcatcatcac

SEQ ID NO: 295 - protein, 274 aa, synthetic construct
  REGION 1..274: note = source = /note="Description of Artificial Sequence: Synthetic polypeptide"
MALPVTALLLPLALLLHAARPEVQLVESGAEVKKPGASVKVSCKASGYTFTSYYMHWVRQAPGQGLEWMGIINPSGGSTSYAQKFQGRVTMTRDTSTSTAYMELSSLRSEDTAVYYCAREAGVVAVDYWGQGTLVTVSSGGGGSGGGGSGGGGSQSALTQPASVSGSPGQSITISCTGTSSDVGGYNYVSWYQQHPGKAPKLMIYDVSNRPSGVSNRFSGSKSGNTASLTISGLQAEDEADYYCSSYTSSSTWVFGGGTKLTVLGSHHHHHHHH

SEQ ID NO: 296 - protein, 487 aa, synthetic construct
  REGION 1..487: note = source = /note="Description of Artificial Sequence: Synthetic polypeptide"
MALPVTALLLPLALLLHAARPEVQLVESGAEVKKPGASVKVSCKASGYTFTSYYMHWVRQAPGQGLEWMGIINPSGGSTSYAQKFQGRVTMTRDTSTSTAYMELSSLRSEDTAVYYCAREAGVVAVDYWGQGTLVTVSSGGGGSGGGGSGGGGSQSALTQPASVSGSPGQSITISCTGTSSDVGGYNYVSWYQQHPGKAPKLMIYDVSNRPSGVSNRFSGSKSGNTASLTISGLQAEDEADYYCSSYTSSSTWVFGGGTKLTVLTTTPAPRPPTPAPTIASQPLSLRPEACRPAAGGAVHTRGLDFACDIYIWAPLAGTCGVLLLSLVITLYCKRGRKKLLYIFKQPFMRPVQTTQEEDGCSCRFPEEEEGGCELRVKFSRSADAPAYKQGQNQLYNELNLGRREEYDVLDKRRGRDPEMGGKPRRKNPQEGLYNELQKDKMAEAYSEIGMKGERRRGKGHDGLYQGLSTATKDTYDALHMQALPPR

SEQ ID NO: 297 - DNA, 1461 bp, synthetic construct
  misc_feature 1..1461: note = source = /note="Description of Artificial Sequence: Synthetic polynucleotide"
  source 1..1461: mol_type = other DNA
atggccctccctgtcaccgccctgctgcttccgctggctcttctgctccacgccgctcggcccgaagtgcaactcgtcgaatctggagcggaagtcaagaagcctggagcaagcgtgaaagtgtcctgtaaagcgtccggttacaccttcacttcgtattacatgcactgggtccgccaagctccgggacagggactggaatggatgggcatcatcaaccctagcggaggatcgacctcctacgcccaaaagttccagggcagagtgaccatgacccgggacaccagcacatcaactgcctacatggagctgtcatcactgaggtccgaggataccgccgtgtactattgcgcccgcgaggccggcgtggtggccgtcgactactggggacagggcactctcgtgaccgtgtcatcgggaggcggcggttccggggggggagggtcggggggcggaggctcccagtccgcactgacgcagccggcttccgtgtctggttcgcccggacagtccatcaccatttcctgcactggaaccagcagcgacgtgggcggttacaactacgtgtcatggtaccagcagcatcccggaaaggccccaaagcttatgatctacgacgtgtccaatcggccgtcgggcgtcagcaaccggttctccggctccaagtccgggaacactgccagcctgaccattagcgggctgcaggccgaggacgaagcggattactactgctcctcctacacttcctcctcgacctgggtgtttggtggaggcaccaagttgactgtgctgaccactaccccagcaccgaggccacccaccccggctcctaccatcgcctcccagcctctgtccctgcgtccggaggcatgtagacccgcagctggtggggccgtgcatacccggggtcttgacttcgcctgcgatatctacatttgggcccctctggctggtacttgcggggtcctgctgctttcactcgtgatcactctttactgtaagcgcggtcggaagaagctgctgtacatctttaagcaacccttcatgaggcctgtgcagactactcaagaggaggacggctgttcatgccggttcccagaggaggaggaaggcggctgcgaactgcgcgtgaaattcagccgcagcgcagatgctccagcctacaagcaggggcagaaccagctctacaacgaactcaatcttggtcggagagaggagtacgacgtgctggacaagcggagaggacgggacccagaaatgggcgggaagccgcgcagaaagaatccccaagagggcctgtacaacgagctccaaaaggataagatggcagaagcctatagcgagattggtatgaaaggggaacgcagaagaggcaaaggccacgacggactgtaccagggactcagcaccgccaccaaggacacctatgacgctcttcacatgcaggccctgccgcctcgg

SEQ ID NO: 298 - protein, 250 aa, synthetic construct
  REGION 1..250: note = source = /note="Description of Artificial Sequence: Synthetic polypeptide"
QVQLVQSGGGVVQPGRSLRLSCAASGFTFSSYAMSWVRQAPGKGLEWVSAISGSGGSTYYADSVKGRFTISRDNSKNTLYLQMNSLRAEDTAVYYCAKEPLFGVVEEDVDYWGQGTLVTVSSGGGGSGGGGSGGGGSDVVMTQSPLSLPVTPGEPASISCRSSQSLLAGNGHNYLDWYLQKPGQSPQLLIYLGSNRASGVPDRFSGSGSGTDFTLKISRVEAEDVGVYYCMQALQNPLTFGGGTKLEIKR

SEQ ID NO: 299 - DNA, 750 bp, synthetic construct
  misc_feature 1..750: note = source = /note="Description of Artificial Sequence: Synthetic polynucleotide"
  source 1..750: mol_type = other DNA
caagtgcagttggtccagagcggaggaggagtggtgcaacccggaagatcattgaggctctcatgtgctgcaagcggattcaccttctcgagctacgcaatgtcctgggtgcgccaggcccctggaaagggactggaatgggtgtccgccatctcgggctccggcggatcaacgtactacgccgactccgtgaagggccgctttactatttcaagagacaactccaagaacactctgtacctccaaatgaactctctgcgggccgaggacaccgccgtgtactactgcgcgaaggagccgctgttcggcgtggtggaggaagatgtggactactggggccagggcactctcgtcaccgtgtcctccggcggtggaggatcgggaggcggaggcagcgggggtggtggctccgacgtcgtgatgacccagtcgcccctgtccctgcccgtgacccctggggaaccggcctccatttcctgccggtccagccagtcgctgctggctggaaacggacacaattaccttgattggtatctgcaaaagcctgggcagtcaccgcagctgctgatctacctcggaagcaaccgggcgtccggggtgccggaccggttctccggttccgggagcggcaccgacttcaccctgaaaatctcgagggtggaggccgaagatgtcggagtgtactattgcatgcaggcgcttcagaacccactcactttcgggggcggtactaagctggaaatcaagcgc

SEQ ID NO: 300 - DNA, 843 bp, synthetic construct
  misc_feature 1..843: note = source = /note="Description of Artificial Sequence: Synthetic polynucleotide"
  source 1..843: mol_type = other DNA
atggccctccctgtcaccgccctgctgcttccgctggctcttctgctccacgccgctcggccccaagtgcagttggtccagagcggaggaggagtggtgcaacccggaagatcattgaggctctcatgtgctgcaagcggattcaccttctcgagctacgcaatgtcctgggtgcgccaggcccctggaaagggactggaatgggtgtccgccatctcgggctccggcggatcaacgtactacgccgactccgtgaagggccgctttactatttcaagagacaactccaagaacactctgtacctccaaatgaactctctgcgggccgaggacaccgccgtgtactactgcgcgaaggagccgctgttcggcgtggtggaggaagatgtggactactggggccagggcactctcgtcaccgtgtcctccggcggtggaggatcgggaggcggaggcagcgggggtggtggctccgacgtcgtgatgacccagtcgcccctgtccctgcccgtgacccctggggaaccggcctccatttcctgccggtccagccagtcgctgctggctggaaacggacacaattaccttgattggtatctgcaaaagcctgggcagtcaccgcagctgctgatctacctcggaagcaaccgggcgtccggggtgccggaccggttctccggttccgggagcggcaccgacttcaccctgaaaatctcgagggtggaggccgaagatgtcggagtgtactattgcatgcaggcgcttcagaacccactcactttcgggggcggtactaagctggaaatcaagcgcggatcgcaccaccatcaccatcatcatcac

SEQ ID NO: 301 - protein, 281 aa, synthetic construct
  REGION 1..281: note = source = /note="Description of Artificial Sequence: Synthetic polypeptide"
MALPVTALLLPLALLLHAARPQVQLVQSGGGVVQPGRSLRLSCAASGFTFSSYAMSWVRQAPGKGLEWVSAISGSGGSTYYADSVKGRFTISRDNSKNTLYLQMNSLRAEDTAVYYCAKEPLFGVVEEDVDYWGQGTLVTVSSGGGGSGGGGSGGGGSDVVMTQSPLSLPVTPGEPASISCRSSQSLLAGNGHNYLDWYLQKPGQSPQLLIYLGSNRASGVPDRFSGSGSGTDFTLKISRVEAEDVGVYYCMQALQNPLTFGGGTKLEIKRGSHHHHHHHH

SEQ ID NO: 302 - protein, 494 aa, synthetic construct
  REGION 1..494: note = source = /note="Description of Artificial Sequence: Synthetic polypeptide"
MALPVTALLLPLALLLHAARPQVQLVQSGGGVVQPGRSLRLSCAASGFTFSSYAMSWVRQAPGKGLEWVSAISGSGGSTYYADSVKGRFTISRDNSKNTLYLQMNSLRAEDTAVYYCAKEPLFGVVEEDVDYWGQGTLVTVSSGGGGSGGGGSGGGGSDVVMTQSPLSLPVTPGEPASISCRSSQSLLAGNGHNYLDWYLQKPGQSPQLLIYLGSNRASGVPDRFSGSGSGTDFTLKISRVEAEDVGVYYCMQALQNPLTFGGGTKLEIKRTTTPAPRPPTPAPTIASQPLSLRPEACRPAAGGAVHTRGLDFACDIYIWAPLAGTCGVLLLSLVITLYCKRGRKKLLYIFKQPFMRPVQTTQEEDGCSCRFPEEEEGGCELRVKFSRSADAPAYKQGQNQLYNELNLGRREEYDVLDKRRGRDPEMGGKPRRKNPQEGLYNELQKDKMAEAYSEIGMKGERRRGKGHDGLYQGLSTATKDTYDALHMQALPPR

SEQ ID NO: 303 - DNA, 1482 bp, synthetic construct
  misc_feature 1..1482: note = source = /note="Description of Artificial Sequence: Synthetic polynucleotide"
  source 1..1482: mol_type = other DNA
atggccctccctgtcaccgccctgctgcttccgctggctcttctgctccacgccgctcggccccaagtgcagttggtccagagcggaggaggagtggtgcaacccggaagatcattgaggctctcatgtgctgcaagcggattcaccttctcgagctacgcaatgtcctgggtgcgccaggcccctggaaagggactggaatgggtgtccgccatctcgggctccggcggatcaacgtactacgccgactccgtgaagggccgctttactatttcaagagacaactccaagaacactctgtacctccaaatgaactctctgcgggccgaggacaccgccgtgtactactgcgcgaaggagccgctgttcggcgtggtggaggaagatgtggactactggggccagggcactctcgtcaccgtgtcctccggcggtggaggatcgggaggcggaggcagcgggggtggtggctccgacgtcgtgatgacccagtcgcccctgtccctgcccgtgacccctggggaaccggcctccatttcctgccggtccagccagtcgctgctggctggaaacggacacaattaccttgattggtatctgcaaaagcctgggcagtcaccgcagctgctgatctacctcggaagcaaccgggcgtccggggtgccggaccggttctccggttccgggagcggcaccgacttcaccctgaaaatctcgagggtggaggccgaagatgtcggagtgtactattgcatgcaggcgcttcagaacccactcactttcgggggcggtactaagctggaaatcaagcgcaccactaccccagcaccgaggccacccaccccggctcctaccatcgcctcccagcctctgtccctgcgtccggaggcatgtagacccgcagctggtggggccgtgcatacccggggtcttgacttcgcctgcgatatctacatttgggcccctctggctggtacttgcggggtcctgctgctttcactcgtgatcactctttactgtaagcgcggtcggaagaagctgctgtacatctttaagcaacccttcatgaggcctgtgcagactactcaagaggaggacggctgttcatgccggttcccagaggaggaggaaggcggctgcgaactgcgcgtgaaattcagccgcagcgcagatgctccagcctacaagcaggggcagaaccagctctacaacgaactcaatcttggtcggagagaggagtacgacgtgctggacaagcggagaggacgggacccagaaatgggcgggaagccgcgcagaaagaatccccaagagggcctgtacaacgagctccaaaaggataagatggcagaagcctatagcgagattggtatgaaaggggaacgcagaagaggcaaaggccacgacggactgtaccagggactcagcaccgccaccaaggacacctatgacgctcttcacatgcaggccctgccgcctcgg

SEQ ID NO: 304 - protein, 245 aa, synthetic construct
  REGION 1..245: note = source = /note="Description of Artificial Sequence: Synthetic polypeptide"
QVQLVQSGAEVKKPGASVKVSCKASGYTFTSYYMHWVRQAPGQGLEWMGIINPSGGSTSYAQKFQGRVTMTRDTSTSTVYMELSSLRSEDTAVYYCARGSGSLGDAFDIWGQGTMVTVSSGGGGSGGGGSGGGGSQSALTQPASVSGSPGQSITISCTGSSSDVGGYNYVSWYQQHPGKAPKLMIYEVSNRPSGVSNRFSGSKSGNTASLTISGLQAEDEADYYCSSYTSSSTLVFGTGTKVTVL

SEQ ID NO: 305 - DNA, 735 bp, synthetic construct
  misc_feature 1..735: note = source = /note="Description of Artificial Sequence: Synthetic polynucleotide"
  source 1..735: mol_type = other DNA
caagtccaactcgtccaaagcggagctgaagtcaagaagcctggagcgtcagtgaaagtgtcctgcaaggcctccggctacacgtttacttcctactacatgcattgggtgcggcaggccccaggtcaaggactggaatggatgggcatcattaacccttccggggggtccacctcgtatgcgcagaagttccagggcagagtgaccatgacccgcgacacctccacctccactgtgtacatggaactgtccagcctgaggtctgaggacactgccgtgtactactgtgcgcgcggtagcggatcactgggcgatgccttcgacatctggggccagggaactatggtcaccgtgtcctccgggggagggggctcgggtggaggaggttcaggcggaggaggctcccagagcgcattgacacagcccgcttcggtgtccggctccccgggacagtccattaccatctcgtgcaccggaagctcaagcgatgtcggagggtacaactacgtgtcgtggtatcagcagcacccgggaaaggcccccaagctcatgatctacgaagtgtccaatcggccgtccggggtgtcgaaccggttcagcggttccaagtcgggcaacactgccagcctgaccatcagcgggctgcaggccgaggacgaggccgactactactgctcctcgtacacctcctcctcaaccctggtgttcggcactggaactaaggtcaccgtgctt

SEQ ID NO: 306 - DNA, 828 bp, synthetic construct
  misc_feature 1..828: note = source = /note="Description of Artificial Sequence: Synthetic polynucleotide"
  source 1..828: mol_type = other DNA
atggccctccctgtcaccgccctgctgcttccgctggctcttctgctccacgccgctcggccccaagtccaactcgtccaaagcggagctgaagtcaagaagcctggagcgtcagtgaaagtgtcctgcaaggcctccggctacacgtttacttcctactacatgcattgggtgcggcaggccccaggtcaaggactggaatggatgggcatcattaacccttccggggggtccacctcgtatgcgcagaagttccagggcagagtgaccatgacccgcgacacctccacctccactgtgtacatggaactgtccagcctgaggtctgaggacactgccgtgtactactgtgcgcgcggtagcggatcactgggcgatgccttcgacatctggggccagggaactatggtcaccgtgtcctccgggggagggggctcgggtggaggaggttcaggcggaggaggctcccagagcgcattgacacagcccgcttcggtgtccggctccccgggacagtccattaccatctcgtgcaccggaagctcaagcgatgtcggagggtacaactacgtgtcgtggtatcagcagcacccgggaaaggcccccaagctcatgatctacgaagtgtccaatcggccgtccggggtgtcgaaccggttcagcggttccaagtcgggcaacactgccagcctgaccatcagcgggctgcaggccgaggacgaggccgactactactgctcctcgtacacctcctcctcaaccctggtgttcggcactggaactaaggtcaccgtgcttggatcgcaccaccatcaccatcatcatcac

SEQ ID NO: 307 - protein, 276 aa, synthetic construct
  REGION 1..276: note = source = /note="Description of Artificial Sequence: Synthetic polypeptide"
MALPVTALLLPLALLLHAARPQVQLVQSGAEVKKPGASVKVSCKASGYTFTSYYMHWVRQAPGQGLEWMGIINPSGGSTSYAQKFQGRVTMTRDTSTSTVYMELSSLRSEDTAVYYCARGSGSLGDAFDIWGQGTMVTVSSGGGGSGGGGSGGGGSQSALTQPASVSGSPGQSITISCTGSSSDVGGYNYVSWYQQHPGKAPKLMIYEVSNRPSGVSNRFSGSKSGNTASLTISGLQAEDEADYYCSSYTSSSTLVFGTGTKVTVLGSHHHHHHHH

SEQ ID NO: 308 - protein, 489 aa, synthetic construct
  REGION 1..489: note = source = /note="Description of Artificial Sequence: Synthetic polypeptide"
MALPVTALLLPLALLLHAARPQVQLVQSGAEVKKPGASVKVSCKASGYTFTSYYMHWVRQAPGQGLEWMGIINPSGGSTSYAQKFQGRVTMTRDTSTSTVYMELSSLRSEDTAVYYCARGSGSLGDAFDIWGQGTMVTVSSGGGGSGGGGSGGGGSQSALTQPASVSGSPGQSITISCTGSSSDVGGYNYVSWYQQHPGKAPKLMIYEVSNRPSGVSNRFSGSKSGNTASLTISGLQAEDEADYYCSSYTSSSTLVFGTGTKVTVLTTTPAPRPPTPAPTIASQPLSLRPEACRPAAGGAVHTRGLDFACDIYIWAPLAGTCGVLLLSLVITLYCKRGRKKLLYIFKQPFMRPVQTTQEEDGCSCRFPEEEEGGCELRVKFSRSADAPAYKQGQNQLYNELNLGRREEYDVLDKRRGRDPEMGGKPRRKNPQEGLYNELQKDKMAEAYSEIGMKGERRRGKGHDGLYQGLSTATKDTYDALHMQALPPR

SEQ ID NO: 309 - DNA, 1467 bp, synthetic construct
  misc_feature 1..1467: note = source = /note="Description of Artificial Sequence: Synthetic polynucleotide"
  source 1..1467: mol_type = other DNA
atggccctccctgtcaccgccctgctgcttccgctggctcttctgctccacgccgctcggccccaagtccaactcgtccaaagcggagctgaagtcaagaagcctggagcgtcagtgaaagtgtcctgcaaggcctccggctacacgtttacttcctactacatgcattgggtgcggcaggccccaggtcaaggactggaatggatgggcatcattaacccttccggggggtccacctcgtatgcgcagaagttccagggcagagtgaccatgacccgcgacacctccacctccactgtgtacatggaactgtccagcctgaggtctgaggacactgccgtgtactactgtgcgcgcggtagcggatcactgggcgatgccttcgacatctggggccagggaactatggtcaccgtgtcctccgggggagggggctcgggtggaggaggttcaggcggaggaggctcccagagcgcattgacacagcccgcttcggtgtccggctccccgggacagtccattaccatctcgtgcaccggaagctcaagcgatgtcggagggtacaactacgtgtcgtggtatcagcagcacccgggaaaggcccccaagctcatgatctacgaagtgtccaatcggccgtccggggtgtcgaaccggttcagcggttccaagtcgggcaacactgccagcctgaccatcagcgggctgcaggccgaggacgaggccgactactactgctcctcgtacacctcctcctcaaccctggtgttcggcactggaactaaggtcaccgtgcttaccactaccccagcaccgaggccacccaccccggctcctaccatcgcctcccagcctctgtccctgcgtccggaggcatgtagacccgcagctggtggggccgtgcatacccggggtcttgacttcgcctgcgatatctacatttgggcccctctggctggtacttgcggggtcctgctgctttcactcgtgatcactctttactgtaagcgcggtcggaagaagctgctgtacatctttaagcaacccttcatgaggcctgtgcagactactcaagaggaggacggctgttcatgccggttcccagaggaggaggaaggcggctgcgaactgcgcgtgaaattcagccgcagcgcagatgctccagcctacaagcaggggcagaaccagctctacaacgaactcaatcttggtcggagagaggagtacgacgtgctggacaagcggagaggacgggacccagaaatgggcgggaagccgcgcagaaagaatccccaagagggcctgtacaacgagctccaaaaggataagatggcagaagcctatagcgagattggtatgaaaggggaacgcagaagaggcaaaggccacgacggactgtaccagggactcagcaccgccaccaaggacacctatgacgctcttcacatgcaggccctgccgcctcgg

SEQ ID NO: 310 - protein, 246 aa, synthetic construct
  REGION 1..246: note = source = /note="Description of Artificial Sequence: Synthetic polypeptide"
QVQLVQSGAEVKKPGASVKVSCKASGYTFTSYYMHWVRQAPGQGLEWMGIINPSGGSTSYAQKFQGRVTMTRDTSTSTVYMELSSLRSEDTAVYYCARDGFGELSGAFDIWGQGTMVTVSSGGGGSGGGGSGGGGSQSALTQPASVSGSPGQSITISCTGTSSDVGGYNYVSWYQQHPGKAPKLMIYDVSNRPSGVSNRFSGSKSGNTASLTISGLQAEDEADYYCSSYASSSTLVFGGGTKVTVL

SEQ ID NO: 311 - DNA, 738 bp, synthetic construct
  misc_feature 1..738: note = source = /note="Description of Artificial Sequence: Synthetic polynucleotide"
  source 1..738: mol_type = other DNA
caagtgcaactcgtccagtccggtgcagaagtcaagaaacccggagcctccgtgaaagtgtcctgcaaggcctccggctacacgttcacttcatactacatgcactgggtccgccaggcgcccggacagggactggagtggatgggcatcatcaacccttccggcggctcgacctcctacgcccaaaagttccagggaagagtgacaatgaccagggatacttcaaccagcactgtctacatggaactgtctagcttgcggtccgaggacactgccgtgtactattgcgctcgggacggtttcggggagctgtccggggcctttgacatctggggccaggggactatggtgaccgtgtcctcgggcggaggcggcagcggaggaggaggttcgggaggcggaggaagccagtcagcactgacccagccagcctcggtgtccgggagcccgggccagagcatcactatttcctgtaccgggacctcctccgacgtgggagggtacaattacgtgtcatggtatcaacagcatccgggaaaggcgccgaagctgatgatctacgacgtgtcgaaccgccctagcggagtgtccaaccggttctccggttcgaagtccgggaacaccgcgagcctgaccattagcggactccaggccgaggatgaagccgactactactgctcctcctacgcttcatcgtccaccctggtgttcggtggtggcaccaaggtcaccgtgctt

SEQ ID NO: 312 - DNA, 831 bp, synthetic construct
  misc_feature 1..831: note = source = /note="Description of Artificial Sequence: Synthetic polynucleotide"
  source 1..831: mol_type = other DNA
atggccctccctgtcaccgccctgctgcttccgctggctcttctgctccacgccgctcggccccaagtgcaactcgtccagtccggtgcagaagtcaagaaacccggagcctccgtgaaagtgtcctgcaaggcctccggctacacgttcacttcatactacatgcactgggtccgccaggcgcccggacagggactggagtggatgggcatcatcaacccttccggcggctcgacctcctacgcccaaaagttccagggaagagtgacaatgaccagggatacttcaaccagcactgtctacatggaactgtctagcttgcggtccgaggacactgccgtgtactattgcgctcgggacggtttcggggagctgtccggggcctttgacatctggggccaggggactatggtgaccgtgtcctcgggcggaggcggcagcggaggaggaggttcgggaggcggaggaagccagtcagcactgacccagccagcctcggtgtccgggagcccgggccagagcatcactatttcctgtaccgggacctcctccgacgtgggagggtacaattacgtgtcatggtatcaacagcatccgggaaaggcgccgaagctgatgatctacgacgtgtcgaaccgccctagcggagtgtccaaccggttctccggttcgaagtccgggaacaccgcgagcctgaccattagcggactccaggccgaggatgaagccgactactactgctcctcctacgcttcatcgtccaccctggtgttcggtggtggcaccaaggtcaccgtgcttggatcgcaccaccatcaccatcatcatcac

SEQ ID NO: 313 - protein, 277 aa, synthetic construct
  REGION 1..277: note = source = /note="Description of Artificial Sequence: Synthetic polypeptide"
MALPVTALLLPLALLLHAARPQVQLVQSGAEVKKPGASVKVSCKASGYTFTSYYMHWVRQAPGQGLEWMGIINPSGGSTSYAQKFQGRVTMTRDTSTSTVYMELSSLRSEDTAVYYCARDGFGELSGAFDIWGQGTMVTVSSGGGGSGGGGSGGGGSQSALTQPASVSGSPGQSITISCTGTSSDVGGYNYVSWYQQHPGKAPKLMIYDVSNRPSGVSNRFSGSKSGNTASLTISGLQAEDEADYYCSSYASSSTLVFGGGTKVTVLGSHHHHHHHH

SEQ ID NO: 314 - protein, 490 aa, synthetic construct
  REGION 1..490: note = source = /note="Description of Artificial Sequence: Synthetic polypeptide"
MALPVTALLLPLALLLHAARPQVQLVQSGAEVKKPGASVKVSCKASGYTFTSYYMHWVRQAPGQGLEWMGIINPSGGSTSYAQKFQGRVTMTRDTSTSTVYMELSSLRSEDTAVYYCARDGFGELSGAFDIWGQGTMVTVSSGGGGSGGGGSGGGGSQSALTQPASVSGSPGQSITISCTGTSSDVGGYNYVSWYQQHPGKAPKLMIYDVSNRPSGVSNRFSGSKSGNTASLTISGLQAEDEADYYCSSYASSSTLVFGGGTKVTVLTTTPAPRPPTPAPTIASQPLSLRPEACRPAAGGAVHTRGLDFACDIYIWAPLAGTCGVLLLSLVITLYCKRGRKKLLYIFKQPFMRPVQTTQEEDGCSCRFPEEEEGGCELRVKFSRSADAPAYKQGQNQLYNELNLGRREEYDVLDKRRGRDPEMGGKPRRKNPQEGLYNELQKDKMAEAYSEIGMKGERRRGKGHDGLYQGLSTATKDTYDALHMQALPPR

SEQ ID NO: 315 - DNA, 1470 bp, synthetic construct
  misc_feature 1..1470: note = source = /note="Description of Artificial Sequence: Synthetic polynucleotide"
  source 1..1470: mol_type = other DNA
atggccctccctgtcaccgccctgctgcttccgctggctcttctgctccacgccgctcggccccaagtgcaactcgtccagtccggtgcagaagtcaagaaacccggagcctccgtgaaagtgtcctgcaaggcctccggctacacgttcacttcatactacatgcactgggtccgccaggcgcccggacagggactggagtggatgggcatcatcaacccttccggcggctcgacctcctacgcccaaaagttccagggaagagtgacaatgaccagggatacttcaaccagcactgtctacatggaactgtctagcttgcggtccgaggacactgccgtgtactattgcgctcgggacggtttcggggagctgtccggggcctttgacatctggggccaggggactatggtgaccgtgtcctcgggcggaggcggcagcggaggaggaggttcgggaggcggaggaagccagtcagcactgacccagccagcctcggtgtccgggagcccgggccagagcatcactatttcctgtaccgggacctcctccgacgtgggagggtacaattacgtgtcatggtatcaacagcatccgggaaaggcgccgaagctgatgatctacgacgtgtcgaaccgccctagcggagtgtccaaccggttctccggttcgaagtccgggaacaccgcgagcctgaccattagcggactccaggccgaggatgaagccgactactactgctcctcctacgcttcatcgtccaccctggtgttcggtggtggcaccaaggtcaccgtgcttaccactaccccagcaccgaggccacccaccccggctcctaccatcgcctcccagcctctgtccctgcgtccggaggcatgtagacccgcagctggtggggccgtgcatacccggggtcttgacttcgcctgcgatatctacatttgggcccctctggctggtacttgcggggtcctgctgctttcactcgtgatcactctttactgtaagcgcggtcggaagaagctgctgtacatctttaagcaacccttcatgaggcctgtgcagactactcaagaggaggacggctgttcatgccggttcccagaggaggaggaaggcggctgcgaactgcgcgtgaaattcagccgcagcgcagatgctccagcctacaagcaggggcagaaccagctctacaacgaactcaatcttggtcggagagaggagtacgacgtgctggacaagcggagaggacgggacccagaaatgggcgggaagccgcgcagaaagaatccccaagagggcctgtacaacgagctccaaaaggataagatggcagaagcctatagcgagattggtatgaaaggggaacgcagaagaggcaaaggccacgacggactgtaccagggactcagcaccgccaccaaggacacctatgacgctcttcacatgcaggccctgccgcctcgg

SEQ ID NO: 316 - protein, 247 aa, synthetic construct
  REGION 1..247: note = source = /note="Description of Artificial Sequence: Synthetic polypeptide"
EVQLVESGAEVKKPGASVKVSCKASGYTFTSYYMHWVRQAPGQGLEWMGIINPSGGSTSYAQKFQGRVTMTRDTSTSTVYMELSSLRSEDTAVYYCARGPIGCSGGSCLDYWGQGTLVTVSSGGGGSGGGGSGGGGSQSALTQPAYVSGSPGQSITISCTGTNSDVGRYNYVSWYQQHPGKAPKLMIYEVSYRPSGVSNRFSGSKSGNTASLTISGLQAEDEADYYCSSYTTSSTLDFGTGTKVTVL

SEQ ID NO: 317 - DNA, 741 bp, synthetic construct
  misc_feature 1..741: note = source = /note="Description of Artificial Sequence: Synthetic polynucleotide"
  source 1..741: mol_type = other DNA
gaagtgcaactcgtcgaatcaggagcagaagtcaagaaaccaggagcctccgtgaaagtcagctgcaaggcctcgggctacactttcacttcctactacatgcattgggtgcgccaggccccgggccagggactggaatggatgggcatcatcaatccctcgggaggttccactagctacgcgcagaagttccagggaagagtgaccatgaccagagacacctcgacttcgacggtgtacatggagctgagctccctgaggagcgaggacactgccgtgtactactgcgcccggggcccgatcggatgcagcggggggtcctgtctcgattactggggccagggcacactcgtgaccgtgtccagcgggggcggtggtagcggaggagggggatcgggcggtggaggatcgcagtccgccctgacccaaccggcgtacgtgtctggatcacccggacagtccattaccatctcctgcaccggaaccaactcggacgtgggccgctacaactacgtgtcatggtaccagcagcaccccgggaaggctcctaagctgatgatctacgaggtgtcctatcggcctagcggtgtcagcaaccggttctccggctccaagtccggcaacactgcttcccttaccatttccgggttgcaagccgaggacgaggccgattactactgttcctcctataccacttcatccaccctggactttggaaccggcaccaaggtcaccgtgctg

SEQ ID NO: 318 - DNA, 834 bp, synthetic construct
  misc_feature 1..834: note = source = /note="Description of Artificial Sequence: Synthetic polynucleotide"
  source 1..834: mol_type = other DNA
atggccctccctgtcaccgccctgctgcttccgctggctcttctgctccacgccgctcggcccgaagtgcaactcgtcgaatcaggagcagaagtcaagaaaccaggagcctccgtgaaagtcagctgcaaggcctcgggctacactttcacttcctactacatgcattgggtgcgccaggccccgggccagggactggaatggatgggcatcatcaatccctcgggaggttccactagctacgcgcagaagttccagggaagagtgaccatgaccagagacacctcgacttcgacggtgtacatggagctgagctccctgaggagcgaggacactgccgtgtactactgcgcccggggcccgatcggatgcagcggggggtcctgtctcgattactggggccagggcacactcgtgaccgtgtccagcgggggcggtggtagcggaggagggggatcgggcggtggaggatcgcagtccgccctgacccaaccggcgtacgtgtctggatcacccggacagtccattaccatctcctgcaccggaaccaactcggacgtgggccgctacaactacgtgtcatggtaccagcagcaccccgggaaggctcctaagctgatgatctacgaggtgtcctatcggcctagcggtgtcagcaaccggttctccggctccaagtccggcaacactgcttcccttaccatttccgggttgcaagccgaggacgaggccgattactactgttcctcctataccacttcatccaccctggactttggaaccggcaccaaggtcaccgtgctgggatcgcaccaccatcaccatcatcatcac

SEQ ID NO: 319 - protein, 278 aa, synthetic construct
  REGION 1..278: note = source = /note="Description of Artificial Sequence: Synthetic polypeptide"
MALPVTALLLPLALLLHAARPEVQLVESGAEVKKPGASVKVSCKASGYTFTSYYMHWVRQAPGQGLEWMGIINPSGGSTSYAQKFQGRVTMTRDTSTSTVYMELSSLRSEDTAVYYCARGPIGCSGGSCLDYWGQGTLVTVSSGGGGSGGGGSGGGGSQSALTQPAYVSGSPGQSITISCTGTNSDVGRYNYVSWYQQHPGKAPKLMIYEVSYRPSGVSNRFSGSKSGNTASLTISGLQAEDEADYYCSSYTTSSTLDFGTGTKVTVLGSHHHHHHHH

SEQ ID NO: 320 - protein, 491 aa, synthetic construct
  REGION 1..491: note = source = /note="Description of Artificial Sequence: Synthetic polypeptide"
MALPVTALLLPLALLLHAARPEVQLVESGAEVKKPGASVKVSCKASGYTFTSYYMHWVRQAPGQGLEWMGIINPSGGSTSYAQKFQGRVTMTRDTSTSTVYMELSSLRSEDTAVYYCARGPIGCSGGSCLDYWGQGTLVTVSSGGGGSGGGGSGGGGSQSALTQPAYVSGSPGQSITISCTGTNSDVGRYNYVSWYQQHPGKAPKLMIYEVSYRPSGVSNRFSGSKSGNTASLTISGLQAEDEADYYCSSYTTSSTLDFGTGTKVTVLTTTPAPRPPTPAPTIASQPLSLRPEACRPAAGGAVHTRGLDFACDIYIWAPLAGTCGVLLLSLVITLYCKRGRKKLLYIFKQPFMRPVQTTQEEDGCSCRFPEEEEGGCELRVKFSRSADAPAYKQGQNQLYNELNLGRREEYDVLDKRRGRDPEMGGKPRRKNPQEGLYNELQKDKMAEAYSEIGMKGERRRGKGHDGLYQGLSTATKDTYDALHMQALPPR

SEQ ID NO: 321 - DNA, 1473 bp, synthetic construct
  misc_feature 1..1473: note = source = /note="Description of Artificial Sequence: Synthetic polynucleotide"
  source 1..1473: mol_type = other DNA
atggccctccctgtcaccgccctgctgcttccgctggctcttctgctccacgccgctcggcccgaagtgcaactcgtcgaatcaggagcagaagtcaagaaaccaggagcctccgtgaaagtcagctgcaaggcctcgggctacactttcacttcctactacatgcattgggtgcgccaggccccgggccagggactggaatggatgggcatcatcaatccctcgggaggttccactagctacgcgcagaagttccagggaagagtgaccatgaccagagacacctcgacttcgacggtgtacatggagctgagctccctgaggagcgaggacactgccgtgtactactgcgcccggggcccgatcggatgcagcggggggtcctgtctcgattactggggccagggcacactcgtgaccgtgtccagcgggggcggtggtagcggaggagggggatcgggcggtggaggatcgcagtccgccctgacccaaccggcgtacgtgtctggatcacccggacagtccattaccatctcctgcaccggaaccaactcggacgtgggccgctacaactacgtgtcatggtaccagcagcaccccgggaaggctcctaagctgatgatctacgaggtgtcctatcggcctagcggtgtcagcaaccggttctccggctccaagtccggcaacactgcttcccttaccatttccgggttgcaagccgaggacgaggccgattactactgttcctcctataccacttcatccaccctggactttggaaccggcaccaaggtcaccgtgctgaccactaccccagcaccgaggccacccaccccggctcctaccatcgcctcccagcctctgtccctgcgtccggaggcatgtagacccgcagctggtggggccgtgcatacccggggtcttgacttcgcctgcgatatctacatttgggcccctctggctggtacttgcggggtcctgctgctttcactcgtgatcactctttactgtaagcgcggtcggaagaagctgctgtacatctttaagcaacccttcatgaggcctgtgcagactactcaagaggaggacggctgttcatgccggttcccagaggaggaggaaggcggctgcgaactgcgcgtgaaattcagccgcagcgcagatgctccagcctacaagcaggggcagaaccagctctacaacgaactcaatcttggtcggagagaggagtacgacgtgctggacaagcggagaggacgggacccagaaatgggcgggaagccgcgcagaaagaatccccaagagggcctgtacaacgagctccaaaaggataagatggcagaagcctatagcgagattggtatgaaaggggaacgcagaagaggcaaaggccacgacggactgtaccagggactcagcaccgccaccaaggacacctatgacgctcttcacatgcaggccctgccgcctcgg

SEQ ID NO: 322 - protein, 246 aa, synthetic construct
  REGION 1..246: note = source = /note="Description of Artificial Sequence: Synthetic polypeptide"
QVQLVQSGAEVKKPGASVKVSCKASGYTFTSYYMHWVRQAPGQGLEWMGIINPSGGSTSYAQKFQGRVTMTRDTSTSTVYMELSSLRSEDTAVYYCARGSYGDYGDAFDIWGQGTTVTVSSGGGGSGGGGSGSGGSQSALTQPASVSGSPGQSITISCTGTSSDVGGYKYVSWYQQHPGKAPKLMIYDVSNRPSGVSNRFSGSKSGNTASLTISGLQAEDEADYYCSSYTSSSTLVFGGGTKLTVL

SEQ ID NO: 323 - DNA, 738 bp, synthetic construct
  misc_feature 1..738: note = source = /note="Description of Artificial Sequence: Synthetic polynucleotide"
  source 1..738: mol_type = other DNA
caagtgcaactcgtccagtccggtgcagaagtcaagaaacccggagcctccgtgaaagtgtcctgcaaggcctcgggctacaccttcacctcctactacatgcactgggtgcgccaggcgccgggccagggacttgagtggatgggtatcatcaacccgtccggcggaagcacctcgtacgcccaaaagtttcaggggagagtgaccatgaccagggacacttcaaccagcaccgtgtacatggaactgtcaagcttgcgctccgaggatactgccgtctactactgcgcccggggatcgtacggagactacggcgacgctttcgatatctggggacagggcacaaccgtgaccgtgtcctccggcggagggggctcgggcggaggaggctcaggttccggcgggagccagtccgcactgactcagccagcgtccgtgagcggtagccctgggcagtctatcacgatttcgtgcactggcacctcctccgacgtgggaggctataagtacgtcagctggtaccaacagcatccgggaaaggcgcctaagctgatgatctatgacgtcagcaaccggccctccggggtgtcaaaccggttcagcggttccaagtcgggaaataccgcctccctgaccattagcgggctgcaggccgaagatgaggctgactactactgttcctcctacacttcatcgtccactctcgtgttcgggggaggaactaagctcaccgtgctg

SEQ ID NO: 324 - DNA, 831 bp, synthetic construct
  misc_feature 1..831: note = source = /note="Description of Artificial Sequence: Synthetic polynucleotide"
  source 1..831: mol_type = other DNA
atggccctccctgtcaccgccctgctgcttccgctggctcttctgctccacgccgctcggccccaagtgcaactcgtccagtccggtgcagaagtcaagaaacccggagcctccgtgaaagtgtcctgcaaggcctcgggctacaccttcacctcctactacatgcactgggtgcgccaggcgccgggccagggacttgagtggatgggtatcatcaacccgtccggcggaagcacctcgtacgcccaaaagtttcaggggagagtgaccatgaccagggacacttcaaccagcaccgtgtacatggaactgtcaagcttgcgctccgaggatactgccgtctactactgcgcccggggatcgtacggagactacggcgacgctttcgatatctggggacagggcacaaccgtgaccgtgtcctccggcggagggggctcgggcggaggaggctcaggttccggcgggagccagtccgcactgactcagccagcgtccgtgagcggtagccctgggcagtctatcacgatttcgtgcactggcacctcctccgacgtgggaggctataagtacgtcagctggtaccaacagcatccgggaaaggcgcctaagctgatgatctatgacgtcagcaaccggccctccggggtgtcaaaccggttcagcggttccaagtcgggaaataccgcctccctgaccattagcgggctgcaggccgaagatgaggctgactactactgttcctcctacacttcatcgtccactctcgtgttcgggggaggaactaagctcaccgtgctgggatcgcaccaccatcaccatcatcatcac

SEQ ID NO: 325 - protein, 277 aa, synthetic construct
  REGION 1..277: note = source = /note="Description of Artificial Sequence: Synthetic polypeptide"
MALPVTALLLPLALLLHAARPQVQLVQSGAEVKKPGASVKVSCKASGYTFTSYYMHWVRQAPGQGLEWMGIINPSGGSTSYAQKFQGRVTMTRDTSTSTVYMELSSLRSEDTAVYYCARGSYGDYGDAFDIWGQGTTVTVSSGGGGSGGGGSGSGGSQSALTQPASVSGSPGQSITISCTGTSSDVGGYKYVSWYQQHPGKAPKLMIYDVSNRPSGVSNRFSGSKSGNTASLTISGLQAEDEADYYCSSYTSSSTLVFGGGTKLTVLGSHHHHHHHH

SEQ ID NO: 326 - protein, 490 aa, synthetic construct
  REGION 1..490: note = source = /note="Description of Artificial Sequence: Synthetic polypeptide"
MALPVTALLLPLALLLHAARPQVQLVQSGAEVKKPGASVKVSCKASGYTFTSYYMHWVRQAPGQGLEWMGIINPSGGSTSYAQKFQGRVTMTRDTSTSTVYMELSSLRSEDTAVYYCARGSYGDYGDAFDIWGQGTTVTVSSGGGGSGGGGSGSGGSQSALTQPASVSGSPGQSITISCTGTSSDVGGYKYVSWYQQHPGKAPKLMIYDVSNRPSGVSNRFSGSKSGNTASLTISGLQAEDEADYYCSSYTSSSTLVFGGGTKLTVLTTTPAPRPPTPAPTIASQPLSLRPEACRPAAGGAVHTRGLDFACDIYIWAPLAGTCGVLLLSLVITLYCKRGRKKLLYIFKQPFMRPVQTTQEEDGCSCRFPEEEEGGCELRVKFSRSADAPAYKQGQNQLYNELNLGRREEYDVLDKRRGRDPEMGGKPRRKNPQEGLYNELQKDKMAEAYSEIGMKGERRRGKGHDGLYQGLSTATKDTYDALHMQALPPR

SEQ ID NO: 327 - DNA, 1470 bp, synthetic construct
  misc_feature 1..1470: note = source = /note="Description of Artificial Sequence: Synthetic polynucleotide"
  source 1..1470: mol_type = other DNA
atggccctccctgtcaccgccctgctgcttccgctggctcttctgctccacgccgctcggccccaagtgcaactcgtccagtccggtgcagaagtcaagaaacccggagcctccgtgaaagtgtcctgcaaggcctcgggctacaccttcacctcctactacatgcactgggtgcgccaggcgccgggccagggacttgagtggatgggtatcatcaacccgtccggcggaagcacctcgtacgcccaaaagtttcaggggagagtgaccatgaccagggacacttcaaccagcaccgtgtacatggaactgtcaagcttgcgctccgaggatactgccgtctactactgcgcccggggatcgtacggagactacggcgacgctttcgatatctggggacagggcacaaccgtgaccgtgtcctccggcggagggggctcgggcggaggaggctcaggttccggcgggagccagtccgcactgactcagccagcgtccgtgagcggtagccctgggcagtctatcacgatttcgtgcactggcacctcctccgacgtgggaggctataagtacgtcagctggtaccaacagcatccgggaaaggcgcctaagctgatgatctatgacgtcagcaaccggccctccggggtgtcaaaccggttcagcggttccaagtcgggaaataccgcctccctgaccattagcgggctgcaggccgaagatgaggctgactactactgttcctcctacacttcatcgtccactctcgtgttcgggggaggaactaagctcaccgtgctgaccactaccccagcaccgaggccacccaccccggctcctaccatcgcctcccagcctctgtccctgcgtccggaggcatgtagacccgcagctggtggggccgtgcatacccggggtcttgacttcgcctgcgatatctacatttgggcccctctggctggtacttgcggggtcctgctgctttcactcgtgatcactctttactgtaagcgcggtcggaagaagctgctgtacatctttaagcaacccttcatgaggcctgtgcagactactcaagaggaggacggctgttcatgccggttcccagaggaggaggaaggcggctgcgaactgcgcgtgaaattcagccgcagcgcagatgctccagcctacaagcaggggcagaaccagctctacaacgaactcaatcttggtcggagagaggagtacgacgtgctggacaagcggagaggacgggacccagaaatgggcgggaagccgcgcagaaagaatccccaagagggcctgtacaacgagctccaaaaggataagatggcagaagcctatagcgagattggtatgaaaggggaacgcagaagaggcaaaggccacgacggactgtaccagggactcagcaccgccaccaaggacacctatgacgctcttcacatgcaggccctgccgcctcgg

SEQ ID NO: 328 - protein, 244 aa, synthetic construct
  REGION 1..244: note = source = /note="Description of Artificial Sequence: Synthetic polypeptide"
EVQLVESGAEVKKPGSSVKVSCKASGGTFSSYAISWVRQAPGQGLEWMGGIIPIFGTANYAQKFQGRVTITADESTSTAYMELSSLRSEDTAVYYCARDHKVVRFGYWGQGTLVTVSSGGGGSGGGGSGGGGSHVILTQPPSASASLGASVKLTCTLSSGHSSYAIAWHQQQPEKGPRYLMKVNSDGSLSKGDGIPDRFSGSTSGAERYLTISSLQSEDEADYYCQTWGSGMAIFGGGTKLTVL

SEQ ID NO: 329 - DNA, 732 bp, synthetic construct
  misc_feature 1..732: note = source = /note="Description of Artificial Sequence: Synthetic polynucleotide"
  source 1..732: mol_type = other DNA
gaagtgcaattggtggaatcaggcgcagaagtcaagaaacccggaagcagcgtgaaagtgtcctgcaaggcctcaggaggcaccttctcgtcctatgccatttcctgggtccgccaggccccgggacagggcctggaatggatgggcggaattatccctatcttcggaaccgcgaactacgcccagaagtttcagggacgcgtgaccatcactgccgatgaatcaacctccactgcgtacatggaactgtcctccctgcggagcgaggacaccgccgtgtactactgcgcaagggatcataaggtcgtgcggttcggatactggggacagggaacccttgtgaccgtgtcctccggcggcggggggtccggcggagggggttccgggggaggcggatcgcacgtgatcctgactcaaccaccctcagcctccgcctctctgggagccagcgtgaagctcacctgtactctgagctcgggacactcgtcgtacgccatcgcttggcaccagcagcagccggagaaggggcctagatacctgatgaaggtcaactccgacggttcgctgagcaagggcgacggcatcccggatcggttcagcggttccacgtccggcgcggagagatacctcacaatctcctcgctccaatccgaggacgaggctgactactactgccagacctggggtagcggcatggcgattttcgggggtggaactaagctgaccgtgctg

SEQ ID NO: 330 - DNA, 825 bp, synthetic construct
  misc_feature 1..825: note = source = /note="Description of Artificial Sequence: Synthetic polynucleotide"
  source 1..825: mol_type = other DNA
atggccctccctgtcaccgccctgctgcttccgctggctcttctgctccacgccgctcggcccgaagtgcaattggtggaatcaggcgcagaagtcaagaaacccggaagcagcgtgaaagtgtcctgcaaggcctcaggaggcaccttctcgtcctatgccatttcctgggtccgccaggccccgggacagggcctggaatggatgggcggaattatccctatcttcggaaccgcgaactacgcccagaagtttcagggacgcgtgaccatcactgccgatgaatcaacctccactgcgtacatggaactgtcctccctgcggagcgaggacaccgccgtgtactactgcgcaagggatcataaggtcgtgcggttcggatactggggacagggaacccttgtgaccgtgtcctccggcggcggggggtccggcggagggggttccgggggaggcggatcgcacgtgatcctgactcaaccaccctcagcctccgcctctctgggagccagcgtgaagctcacctgtactctgagctcgggacactcgtcgtacgccatcgcttggcaccagcagcagccggagaaggggcctagatacctgatgaaggtcaactccgacggttcgctgagcaagggcgacggcatcccggatcggttcagcggttccacgtccggcgcggagagatacctcacaatctcctcgctccaatccgaggacgaggctgactactactgccagacctggggtagcggcatggcgattttcgggggtggaactaagctgaccgtgctgggatcgcaccaccatcaccatcatcatcac

SEQ ID NO: 331 - protein, 275 aa, synthetic construct
  REGION 1..275: note = source = /note="Description of Artificial Sequence: Synthetic polypeptide"
MALPVTALLLPLALLLHAARPEVQLVESGAEVKKPGSSVKVSCKASGGTFSSYAISWVRQAPGQGLEWMGGIIPIFGTANYAQKFQGRVTITADESTSTAYMELSSLRSEDTAVYYCARDHKVVRFGYWGQGTLVTVSSGGGGSGGGGSGGGGSHVILTQPPSASASLGASVKLTCTLSSGHSSYAIAWHQQQPEKGPRYLMKVNSDGSLSKGDGIPDRFSGSTSGAERYLTISSLQSEDEADYYCQTWGSGMAIFGGGTKLTVLGSHHHHHHHH

SEQ ID NO: 332 - protein, 488 aa, synthetic construct
  REGION 1..488: note = source = /note="Description of Artificial Sequence: Synthetic polypeptide"
MALPVTALLLPLALLLHAARPEVQLVESGAEVKKPGSSVKVSCKASGGTFSSYAISWVRQAPGQGLEWMGGIIPIFGTANYAQKFQGRVTITADESTSTAYMELSSLRSEDTAVYYCARDHKVVRFGYWGQGTLVTVSSGGGGSGGGGSGGGGSHVILTQPPSASASLGASVKLTCTLSSGHSSYAIAWHQQQPEKGPRYLMKVNSDGSLSKGDGIPDRFSGSTSGAERYLTISSLQSEDEADYYCQTWGSGMAIFGGGTKLTVLTTTPAPRPPTPAPTIASQPLSLRPEACRPAAGGAVHTRGLDFACDIYIWAPLAGTCGVLLLSLVITLYCKRGRKKLLYIFKQPFMRPVQTTQEEDGCSCRFPEEEEGGCELRVKFSRSADAPAYKQGQNQLYNELNLGRREEYDVLDKRRGRDPEMGGKPRRKNPQEGLYNELQKDKMAEAYSEIGMKGERRRGKGHDGLYQGLSTATKDTYDALHMQALPPR

SEQ ID NO: 333 - DNA, 1464 bp, synthetic construct
  misc_feature 1..1464: note = source = /note="Description of Artificial Sequence: Synthetic polynucleotide"
  source 1..1464: mol_type = other DNA
atggccctccctgtcaccgccctgctgcttccgctggctcttctgctccacgccgctcggcccgaagtgcaattggtggaatcaggcgcagaagtcaagaaacccggaagcagcgtgaaagtgtcctgcaaggcctcaggaggcaccttctcgtcctatgccatttcctgggtccgccaggccccgggacagggcctggaatggatgggcggaattatccctatcttcggaaccgcgaactacgcccagaagtttcagggacgcgtgaccatcactgccgatgaatcaacctccactgcgtacatggaactgtcctccctgcggagcgaggacaccgccgtgtactactgcgcaagggatcataaggtcgtgcggttcggatactggggacagggaacccttgtgaccgtgtcctccggcggcggggggtccggcggagggggttccgggggaggcggatcgcacgtgatcctgactcaaccaccctcagcctccgcctctctgggagccagcgtgaagctcacctgtactctgagctcgggacactcgtcgtacgccatcgcttggcaccagcagcagccggagaaggggcctagatacctgatgaaggtcaactccgacggttcgctgagcaagggcgacggcatcccggatcggttcagcggttccacgtccggcgcggagagatacctcacaatctcctcgctccaatccgaggacgaggctgactactactgccagacctggggtagcggcatggcgattttcgggggtggaactaagctgaccgtgctgaccactaccccagcaccgaggccacccaccccggctcctaccatcgcctcccagcctctgtccctgcgtccggaggcatgtagacccgcagctggtggggccgtgcatacccggggtcttgacttcgcctgcgatatctacatttgggcccctctggctggtacttgcggggtcctgctgctttcactcgtgatcactctttactgtaagcgcggtcggaagaagctgctgtacatctttaagcaacccttcatgaggcctgtgcagactactcaagaggaggacggctgttcatgccggttcccagaggaggaggaaggcggctgcgaactgcgcgtgaaattcagccgcagcgcagatgctccagcctacaagcaggggcagaaccagctctacaacgaactcaatcttggtcggagagaggagtacgacgtgctggacaagcggagaggacgggacccagaaatgggcgggaagccgcgcagaaagaatccccaagagggcctgtacaacgagctccaaaaggataagatggcagaagcctatagcgagattggtatgaaaggggaacgcagaagaggcaaaggccacgacggactgtaccagggactcagcaccgccaccaaggacacctatgacgctcttcacatgcaggccctgccgcctcgg

SEQ ID NO: 334 - protein, 241 aa, synthetic construct
  REGION 1..241: note = source = /note="Description of Artificial Sequence: Synthetic polypeptide"
QVQLVQSGAEVKKPGASVKVSCKASGYTFTSYYMHWVRQAPGQGLEWMGIINPSGGSTSYAQKFQGRVTMTRDTSTSTVYMELSSLRSEDTAVYYCARGDYYMDVWGKGTTVTVSSGGGGSGGGGSGGGGSQSALTQPASASGSPGQSVTISCTGTSSDVGGYNYVSWYQQHPGKAPKLMIYEVSKRPSGVPDRFSGSKSGNTASLTISGLQAEDEADYYCSSYTSSGTLVFGGGTKLTVL

SEQ ID NO: 335 - DNA, 723 bp, synthetic construct
  misc_feature 1..723: note = source = /note="Description of Artificial Sequence: Synthetic polynucleotide"
  source 1..723: mol_type = other DNA
caagtgcaactcgtccagtccggtgcagaagtcaagaaacccggtgcttccgtgaaagtgtcctgcaaggcctcaggttacaccttcacctcctactacatgcattgggtccgccaagcccccggacaaggcctggagtggatgggaattatcaacccgtccggcggcagcacaagctacgcccagaagttccagggacgcgtgactatgaccagagatacctccacctccaccgtgtacatggaactgtcctcactccggtcggaagataccgccgtgtactactgtgcccggggagactactatatggacgtctggggaaagggcaccaccgtgactgtgtcgtcgggcggcgggggttcgggaggaggaggaagcggtggcgggggaagccagtccgcactgactcagcccgcgtcggccagcgggagccctggccagagcgtgaccatttcgtgcaccggaacttcctctgacgtcggcggatacaactacgtgtcctggtaccagcagcaccctggaaaggccccgaagctgatgatctacgaggtgtccaagaggccatccggcgtgccggaccggttttcgggatcaaagtccgggaacacggccagcctgaccatcagcgggcttcaggctgaggacgaagcggattactactgctcctcctatacttcatccggcaccttggtgttcggcggagggactaagctgactgtgctc

SEQ ID NO: 336 - DNA, 816 bp, synthetic construct
  misc_feature 1..816: note = source = /note="Description of Artificial Sequence: Synthetic polynucleotide"
  source 1..816: mol_type = other DNA
atggccctccctgtcaccgccctgctgcttccgctggctcttctgctccacgccgctcggccccaagtgcaactcgtccagtccggtgcagaagtcaagaaacccggtgcttccgtgaaagtgtcctgcaaggcctcaggttacaccttcacctcctactacatgcattgggtccgccaagcccccggacaaggcctggagtggatgggaattatcaacccgtccggcggcagcacaagctacgcccagaagttccagggacgcgtgactatgaccagagatacctccacctccaccgtgtacatggaactgtcctcactccggtcggaagataccgccgtgtactactgtgcccggggagactactatatggacgtctggggaaagggcaccaccgtgactgtgtcgtcgggcggcgggggttcgggaggaggaggaagcggtggcgggggaagccagtccgcactgactcagcccgcgtcggccagcgggagccctggccagagcgtgaccatttcgtgcaccggaacttcctctgacgtcggcggatacaactacgtgtcctggtaccagcagcaccctggaaaggccccgaagctgatgatctacgaggtgtccaagaggccatccggcgtgccggaccggttttcgggatcaaagtccgggaacacggccagcctgaccatcagcgggcttcaggctgaggacgaagcggattactactgctcctcctatacttcatccggcaccttggtgttcggcggagggactaagctgactgtgctcggatcgcaccaccatcaccatcatcatcac

SEQ ID NO: 337 - protein, 272 aa, synthetic construct
  REGION 1..272: note = source = /note="Description of Artificial Sequence: Synthetic polypeptide"
MALPVTALLLPLALLLHAARPQVQLVQSGAEVKKPGASVKVSCKASGYTFTSYYMHWVRQAPGQGLEWMGIINPSGGSTSYAQKFQGRVTMTRDTSTSTVYMELSSLRSEDTAVYYCARGDYYMDVWGKGTTVTVSSGGGGSGGGGSGGGGSQSALTQPASASGSPGQSVTISCTGTSSDVGGYNYVSWYQQHPGKAPKLMIYEVSKRPSGVPDRFSGSKSGNTASLTISGLQAEDEADYYCSSYTSSGTLVFGGGTKLTVLGSHHHHHHHH

SEQ ID NO: 338 - protein, 485 aa, synthetic construct
  REGION 1..485: note = source = /note="Description of Artificial Sequence: Synthetic polypeptide"
MALPVTALLLPLALLLHAARPQVQLVQSGAEVKKPGASVKVSCKASGYTFTSYYMHWVRQAPGQGLEWMGIINPSGGSTSYAQKFQGRVTMTRDTSTSTVYMELSSLRSEDTAVYYCARGDYYMDVWGKGTTVTVSSGGGGSGGGGSGGGGSQSALTQPASASGSPGQSVTISCTGTSSDVGGYNYVSWYQQHPGKAPKLMIYEVSKRPSGVPDRFSGSKSGNTASLTISGLQAEDEADYYCSSYTSSGTLVFGGGTKLTVLTTTPAPRPPTPAPTIASQPLSLRPEACRPAAGGAVHTRGLDFACDIYIWAPLAGTCGVLLLSLVITLYCKRGRKKLLYIFKQPFMRPVQTTQEEDGCSCRFPEEEEGGCELRVKFSRSADAPAYKQGQNQLYNELNLGRREEYDVLDKRRGRDPEMGGKPRRKNPQEGLYNELQKDKMAEAYSEIGMKGERRRGKGHDGLYQGLSTATKDTYDALHMQALPPR

SEQ ID NO: 339 - DNA, 1455 bp, synthetic construct
  misc_feature 1..1455: note = source = /note="Description of Artificial Sequence: Synthetic polynucleotide"
  source 1..1455: mol_type = other DNA
atggccctccctgtcaccgccctgctgcttccgctggctcttctgctccacgccgctcggccccaagtgcaactcgtccagtccggtgcagaagtcaagaaacccggtgcttccgtgaaagtgtcctgcaaggcctcaggttacaccttcacctcctactacatgcattgggtccgccaagcccccggacaaggcctggagtggatgggaattatcaacccgtccggcggcagcacaagctacgcccagaagttccagggacgcgtgactatgaccagagatacctccacctccaccgtgtacatggaactgtcctcactccggtcggaagataccgccgtgtactactgtgcccggggagactactatatggacgtctggggaaagggcaccaccgtgactgtgtcgtcgggcggcgggggttcgggaggaggaggaagcggtggcgggggaagccagtccgcactgactcagcccgcgtcggccagcgggagccctggccagagcgtgaccatttcgtgcaccggaacttcctctgacgtcggcggatacaactacgtgtcctggtaccagcagcaccctggaaaggccccgaagctgatgatctacgaggtgtccaagaggccatccggcgtgccggaccggttttcgggatcaaagtccgggaacacggccagcctgaccatcagcgggcttcaggctgaggacgaagcggattactactgctcctcctatacttcatccggcaccttggtgttcggcggagggactaagctgactgtgctcaccactaccccagcaccgaggccacccaccccggctcctaccatcgcctcccagcctctgtccctgcgtccggaggcatgtagacccgcagctggtggggccgtgcatacccggggtcttgacttcgcctgcgatatctacatttgggcccctctggctggtacttgcggggtcctgctgctttcactcgtgatcactctttactgtaagcgcggtcggaagaagctgctgtacatctttaagcaacccttcatgaggcctgtgcagactactcaagaggaggacggctgttcatgccggttcccagaggaggaggaaggcggctgcgaactgcgcgtgaaattcagccgcagcgcagatgctccagcctacaagcaggggcagaaccagctctacaacgaactcaatcttggtcggagagaggagtacgacgtgctggacaagcggagaggacgggacccagaaatgggcgggaagccgcgcagaaagaatccccaagagggcctgtacaacgagctccaaaaggataagatggcagaagcctatagcgagattggtatgaaaggggaacgcagaagaggcaaaggccacgacggactgtaccagggactcagcaccgccaccaaggacacctatgacgctcttcacatgcaggccctgccgcctcgg

SEQ ID NO: 340 - protein, 247 aa, synthetic construct
  REGION 1..247: note = source = /note="Description of Artificial Sequence: Synthetic polypeptide"
EVQLVESGGGLVQPGGSLRLSCAASGFTFSSYAMSWVRQAPGKGLEWVSYISSSSSTIYYADSVKGRFTISRDNAKNSLYLQMNSLRAEDTAVYYCARDGPIRYFDHSKAFDIWGQGTMVTVSSGGGGSGGGGSGGGGSSSELTQDPAVSVALGQTVRITCQGDSLRSYYASWYQQKPGQAPVLVIYGKNNRPSGIPDRFSGSSSGNTASLTITGAQAEDEADYYRNSRDSSGNPYVFGTGTKVTVL

SEQ ID NO: 341 - DNA, 741 bp, synthetic construct
  misc_feature 1..741: note = source = /note="Description of Artificial Sequence: Synthetic polynucleotide"
  source 1..741: mol_type = other DNA
gaagtgcaattggtggaatcaggaggaggacttgtgcaacctggaggatctctgagactgtcatgcgccgcgtcgggattcactttctcctcctacgcaatgtcgtgggtcagacaggcccccggaaagggcctggaatgggtgtcatacatcagctcctcctcctccacgatctactacgccgactctgtgaaggggcggttcaccattagccgggacaacgcaaagaactccctgtatctgcaaatgaacagcctcagggcggaagataccgccgtgtactactgtgcgcgcgatggtccgattcgctatttcgaccactccaaggccttcgatatctggggccagggaaccatggtcaccgtgtcgtccggtggaggcggcagcggggggggcggaagcggcggcgggggttcatcctcggagctgactcaggaccccgccgtgtccgtggctctgggacagaccgtgcgcatcacatgccagggagattccctgcggtcgtactacgcctcctggtaccagcagaaaccgggccaggcccccgtcctcgtgatctacggaaagaacaacaggccttcgggtatcccagaccggttcagcggcagctccagcggaaacaccgcaagcctcactattaccggggcccaggctgaggacgaggccgactactaccggaactcccgcgactcctcgggcaatccgtacgtctttggtactgggaccaaggtcaccgtgctg

SEQ ID NO: 342 - DNA, 834 bp, synthetic construct
  misc_feature 1..834: note = source = /note="Description of Artificial Sequence: Synthetic polynucleotide"
  source 1..834: mol_type = other DNA
atggccctccctgtcaccgccctgctgcttccgctggctcttctgctccacgccgctcggcccgaagtgcaattggtggaatcaggaggaggacttgtgcaacctggaggatctctgagactgtcatgcgccgcgtcgggattcactttctcctcctacgcaatgtcgtgggtcagacaggcccccggaaagggcctggaatgggtgtcatacatcagctcctcctcctccacgatctactacgccgactctgtgaaggggcggttcaccattagccgggacaacgcaaagaactccctgtatctgcaaatgaacagcctcagggcggaagataccgccgtgtactactgtgcgcgcgatggtccgattcgctatttcgaccactccaaggccttcgatatctggggccagggaaccatggtcaccgtgtcgtccggtggaggcggcagcggggggggcggaagcggcggcgggggttcatcctcggagctgactcaggaccccgccgtgtccgtggctctgggacagaccgtgcgcatcacatgccagggagattccctgcggtcgtactacgcctcctggtaccagcagaaaccgggccaggcccccgtcctcgtgatctacggaaagaacaacaggccttcgggtatcccagaccggttcagcggcagctccagcggaaacaccgcaagcctcactattaccggggcccaggctgaggacgaggccgactactaccggaactcccgcgactcctcgggcaatccgtacgtctttggtactgggaccaaggtcaccgtgctgggatcgcaccaccatcaccatcatcatcac

SEQ ID NO: 343 - protein, 278 aa, synthetic construct
  REGION 1..278: note = source = /note="Description of Artificial Sequence: Synthetic polypeptide"
MALPVTALLLPLALLLHAARPEVQLVESGGGLVQPGGSLRLSCAASGFTFSSYAMSWVRQAPGKGLEWVSYISSSSSTIYYADSVKGRFTISRDNAKNSLYLQMNSLRAEDTAVYYCARDGPIRYFDHSKAFDIWGQGTMVTVSSGGGGSGGGGSGGGGSSSELTQDPAVSVALGQTVRITCQGDSLRSYYASWYQQKPGQAPVLVIYGKNNRPSGIPDRFSGSSSGNTASLTITGAQAEDEADYYRNSRDSSGNPYVFGTGTKVTVLGSHHHHHHHH

SEQ ID NO: 344 - protein, 491 aa, synthetic construct
  REGION 1..491: note = source = /note="Description of Artificial Sequence: Synthetic polypeptide"
MALPVTALLLPLALLLHAARPEVQLVESGGGLVQPGGSLRLSCAASGFTFSSYAMSWVRQAPGKGLEWVSYISSSSSTIYYADSVKGRFTISRDNAKNSLYLQMNSLRAEDTAVYYCARDGPIRYFDHSKAFDIWGQGTMVTVSSGGGGSGGGGSGGGGSSSELTQDPAVSVALGQTVRITCQGDSLRSYYASWYQQKPGQAPVLVIYGKNNRPSGIPDRFSGSSSGNTASLTITGAQAEDEADYYRNSRDSSGNPYVFGTGTKVTVLTTTPAPRPPTPAPTIASQPLSLRPEACRPAAGGAVHTRGLDFACDIYIWAPLAGTCGVLLLSLVITLYCKRGRKKLLYIFKQPFMRPVQTTQEEDGCSCRFPEEEEGGCELRVKFSRSADAPAYKQGQNQLYNELNLGRREEYDVLDKRRGRDPEMGGKPRRKNPQEGLYNELQKDKMAEAYSEIGMKGERRRGKGHDGLYQGLSTATKDTYDALHMQALPPR

SEQ ID NO: 345 - DNA, 1473 bp, synthetic construct
  misc_feature 1..1473: note = source = /note="Description of Artificial Sequence: Synthetic polynucleotide"
  source 1..1473: mol_type = other DNA
atggccctccctgtcaccgccctgctgcttccgctggctcttctgctccacgccgctcggcccgaagtgcaattggtggaatcaggaggaggacttgtgcaacctggaggatctctgagactgtcatgcgccgcgtcgggattcactttctcctcctacgcaatgtcgtgggtcagacaggcccccggaaagggcctggaatgggtgtcatacatcagctcctcctcctccacgatctactacgccgactctgtgaaggggcggttcaccattagccgggacaacgcaaagaactccctgtatctgcaaatgaacagcctcagggcggaagataccgccgtgtactactgtgcgcgcgatggtccgattcgctatttcgaccactccaaggccttcgatatctggggccagggaaccatggtcaccgtgtcgtccggtggaggcggcagcggggggggcggaagcggcggcgggggttcatcctcggagctgactcaggaccccgccgtgtccgtggctctgggacagaccgtgcgcatcacatgccagggagattccctgcggtcgtactacgcctcctggtaccagcagaaaccgggccaggcccccgtcctcgtgatctacggaaagaacaacaggccttcgggtatcccagaccggttcagcggcagctccagcggaaacaccgcaagcctcactattaccggggcccaggctgaggacgaggccgactactaccggaactcccgcgactcctcgggcaatccgtacgtctttggtactgggaccaaggtcaccgtgctgaccactaccccagcaccgaggccacccaccccggctcctaccatcgcctcccagcctctgtccctgcgtccggaggcatgtagacccgcagctggtggggccgtgcatacccggggtcttgacttcgcctgcgatatctacatttgggcccctctggctggtacttgcggggtcctgctgctttcactcgtgatcactctttactgtaagcgcggtcggaagaagctgctgtacatctttaagcaacccttcatgaggcctgtgcagactactcaagaggaggacggctgttcatgccggttcccagaggaggaggaaggcggctgcgaactgcgcgtgaaattcagccgcagcgcagatgctccagcctacaagcaggggcagaaccagctctacaacgaactcaatcttggtcggagagaggagtacgacgtgctggacaagcggagaggacgggacccagaaatgggcgggaagccgcgcagaaagaatccccaagagggcctgtacaacgagctccaaaaggataagatggcagaagcctatagcgagattggtatgaaaggggaacgcagaagaggcaaaggccacgacggactgtaccagggactcagcaccgccaccaaggacacctatgacgctcttcacatgcaggccctgccgcctcgg

SEQ ID NO: 346 - protein, 244 aa, synthetic construct
  REGION 1..244: note = source = /note="Description of Artificial Sequence: Synthetic polypeptide"
QVQLVQSGAEVKKPGASVKVSCKASGYTFTSYYMHWVRQAPGQGLEWMGIINPSGGSTSYAQKFQGRVTMTRDTSISTAYMELSRLRSDDTAVYYCAREMDDSSGPDYWGQGTLVTVSSGGGGSGGGGSGGGGSQSALTQPASVSGSPGQSITISCTGTSSDVGGYNYVSWYQQHPGKAPKLMIYEVSNRPSGVSNRFSGSKSGNTASLTISGLQAEDEADYYCSSYTSSSTLVFGTGTKLTVL

SEQ ID NO: 347 - DNA, 732 bp, synthetic construct
  misc_feature 1..732: note = source = /note="Description of Artificial Sequence: Synthetic polynucleotide"
  source 1..732: mol_type = other DNA
caagtgcagctcgtccagtccggtgcagaagtcaagaaacccggtgcttccgtgaaagtgtcctgcaaggcatccggctacacgttcacctcctactacatgcattgggtccgccaagcccccggccaaggcctggagtggatggggatcattaacccaagcggaggaagcactagctacgcgcagaagtttcagggccgcgtgaccatgaccagggatacttccatctccaccgcttacatggaactgtcgcggctgagaagcgacgacacagccgtgtactactgtgcccgggaaatggacgactcctccgggcctgattactggggacaggggactctggtcaccgtgtcgtccggtggaggcggatcggggggcggaggttccggcggagggggctcacagtccgcgctgacccagccggccagcgtgtcaggatcaccgggccagagcatcaccatttcctgcaccggaacctcatcggacgtcggcggatataactacgtgtcgtggtaccagcagcaccctggaaaggccccgaagctcatgatctacgaggtgtccaatagacccagcggagtgtcgaaccggttcagcgggtccaagtcgggaaacaccgccagcttgaccatctctggactgcaagccgaggacgaagccgattactactgctcctcgtatacttcctcctcaacccttgtgttcggaactggcactaagctgaccgtgctc

SEQ ID NO: 348 - DNA, 825 bp, synthetic construct
  misc_feature 1..825: note = source = /note="Description of Artificial Sequence: Synthetic polynucleotide"
  source 1..825: mol_type = other DNA
atggccctccctgtcaccgccctgctgcttccgctggctcttctgctccacgccgctcggccccaagtgcagctcgtccagtccggtgcagaagtcaagaaacccggtgcttccgtgaaagtgtcctgcaaggcatccggctacacgttcacctcctactacatgcattgggtccgccaagcccccggccaaggcctggagtggatggggatcattaacccaagcggaggaagcactagctacgcgcagaagtttcagggccgcgtgaccatgaccagggatacttccatctccaccgcttacatggaactgtcgcggctgagaagcgacgacacagccgtgtactactgtgcccgggaaatggacgactcctccgggcctgattactggggacaggggactctggtcaccgtgtcgtccggtggaggcggatcggggggcggaggttccggcggagggggctcacagtccgcgctgacccagccggccagcgtgtcaggatcaccgggccagagcatcaccatttcctgcaccggaacctcatcggacgtcggcggatataactacgtgtcgtggtaccagcagcaccctggaaaggccccgaagctcatgatctacgaggtgtccaatagacccagcggagtgtcgaaccggttcagcgggtccaagtcgggaaacaccgccagcttgaccatctctggactgcaagccgaggacgaagccgattactactgctcctcgtatacttcctcctcaacccttgtgttcggaactggcactaagctgaccgtgctcggatcgcaccaccatcaccatcatcatcac

SEQ ID NO: 349 - protein, 275 aa, synthetic construct
  REGION 1..275: note = source = /note="Description of Artificial Sequence: Synthetic polypeptide"
MALPVTALLLPLALLLHAARPQVQLVQSGAEVKKPGASVKVSCKASGYTFTSYYMHWVRQAPGQGLEWMGIINPSGGSTSYAQKFQGRVTMTRDTSISTAYMELSRLRSDDTAVYYCAREMDDSSGPDYWGQGTLVTVSSGGGGSGGGGSGGGGSQSALTQPASVSGSPGQSITISCTGTSSDVGGYNYVSWYQQHPGKAPKLMIYEVSNRPSGVSNRFSGSKSGNTASLTISGLQAEDEADYYCSSYTSSSTLVFGTGTKLTVLGSHHHHHHHH

SEQ ID NO: 350 - protein, 488 aa, synthetic construct
  REGION 1..488: note = source = /note="Description of Artificial Sequence: Synthetic polypeptide"
MALPVTALLLPLALLLHAARPQVQLVQSGAEVKKPGASVKVSCKASGYTFTSYYMHWVRQAPGQGLEWMGIINPSGGSTSYAQKFQGRVTMTRDTSISTAYMELSRLRSDDTAVYYCAREMDDSSGPDYWGQGTLVTVSSGGGGSGGGGSGGGGSQSALTQPASVSGSPGQSITISCTGTSSDVGGYNYVSWYQQHPGKAPKLMIYEVSNRPSGVSNRFSGSKSGNTASLTISGLQAEDEADYYCSSYTSSSTLVFGTGTKLTVLTTTPAPRPPTPAPTIASQPLSLRPEACRPAAGGAVHTRGLDFACDIYIWAPLAGTCGVLLLSLVITLYCKRGRKKLLYIFKQPFMRPVQTTQEEDGCSCRFPEEEEGGCELRVKFSRSADAPAYKQGQNQLYNELNLGRREEYDVLDKRRGRDPEMGGKPRRKNPQEGLYNELQKDKMAEAYSEIGMKGERRRGKGHDGLYQGLSTATKDTYDALHMQALPPR

SEQ ID NO: 351 - DNA, 1464 bp, synthetic construct
  misc_feature 1..1464: note = source = /note="Description of Artificial Sequence: Synthetic polynucleotide"
  source 1..1464: mol_type = other DNA
atggccctccctgtcaccgccctgctgcttccgctggctcttctgctccacgccgctcggccccaagtgcagctcgtccagtccggtgcagaagtcaagaaacccggtgcttccgtgaaagtgtcctgcaaggcatccggctacacgttcacctcctactacatgcattgggtccgccaagcccccggccaaggcctggagtggatggggatcattaacccaagcggaggaagcactagctacgcgcagaagtttcagggccgcgtgaccatgaccagggatacttccatctccaccgcttacatggaactgtcgcggctgagaagcgacgacacagccgtgtactactgtgcccgggaaatggacgactcctccgggcctgattactggggacaggggactctggtcaccgtgtcgtccggtggaggcggatcggggggcggaggttccggcggagggggctcacagtccgcgctgacccagccggccagcgtgtcaggatcaccgggccagagcatcaccatttcctgcaccggaacctcatcggacgtcggcggatataactacgtgtcgtggtaccagcagcaccctggaaaggccccgaagctcatgatctacgaggtgtccaatagacccagcggagtgtcgaaccggttcagcgggtccaagtcgggaaacaccgccagcttgaccatctctggactgcaagccgaggacgaagccgattactactgctcctcgtatacttcctcctcaacccttgtgttcggaactggcactaagctgaccgtgctcaccactaccccagcaccgaggccacccaccccggctcctaccatcgcctcccagcctctgtccctgcgtccggaggcatgtagacccgcagctggtggggccgtgcatacccggggtcttgacttcgcctgcgatatctacatttgggcccctctggctggtacttgcggggtcctgctgctttcactcgtgatcactctttactgtaagcgcggtcggaagaagctgctgtacatctttaagcaacccttcatgaggcctgtgcagactactcaagaggaggacggctgttcatgccggttcccagaggaggaggaaggcggctgcgaactgcgcgtgaaattcagccgcagcgcagatgctccagcctacaagcaggggcagaaccagctctacaacgaactcaatcttggtcggagagaggagtacgacgtgctggacaagcggagaggacgggacccagaaatgggcgggaagccgcgcagaaagaatccccaagagggcctgtacaacgagctccaaaaggataagatggcagaagcctatagcgagattggtatgaaaggggaacgcagaagaggcaaaggccacgacggactgtaccagggactcagcaccgccaccaaggacacctatgacgctcttcacatgcaggccctgccgcctcgg

SEQ ID NO: 352 - protein, 252 aa, synthetic construct
  REGION 1..252: note = source = /note="Description of Artificial Sequence: Synthetic polypeptide"
EVQLVESGAEVKKPGESLKISCKGSGYSFTGSWIGWGRQMPGKGLEWMGIIYPGDSDTRYSPSFQGQVTISADKSISTAYLQWSSLKASDTAMYYCARGFLRGGDCCGALDIWGQGTMVTVSSGGGGSGGGGSGGGGSDIVMTQSPLSLPVTPGEPASISCRSSQSLLHSNGYNYLDWYLQKPGQSPQLLIYLGSNRASGVPDRFSGSGSGTDFTLKISRVEAEDVGVYYCMQALQTPPWTFGQGTKLEIKR

SEQ ID NO: 353 - DNA, 756 bp, synthetic construct
  misc_feature 1..756: note = source = /note="Description of Artificial Sequence: Synthetic polynucleotide"
  source 1..756: mol_type = other DNA
gaagtgcagttggtggaatcaggagcagaagtcaagaaacccggagaaagcctgaagatctcgtgcaaagggagcggatactcgttcaccggatcatggattggatggggccgccagatgcctggaaagggtctggaatggatgggaatcatctacccgggggactccgatactcggtactccccgagctttcagggccaggtcaccatctccgccgacaagtccatctccactgcgtatttgcagtggagctcactgaaggcctcggacaccgctatgtactactgcgcccgcggtttcctgaggggcggagattgttgcggcgcccttgatatctggggccaggggaccatggtgaccgtgtcctccggtggtggcggctccggcggaggagggtccgggggaggaggctccgacattgtgatgacccagagccccctgtccctgcccgtgactcctggggagccagcctcgatcagctgccggtcgtcccagtcccttctgcactccaacggctacaactatctcgattggtacctccagaagcctggtcaaagcccgcagctgctgatctacctcggttcaaacagagcttccggggtgccggacagattcagcggatctggatcgggcacagacttcacgctcaagatttcccgcgtggaggccgaggacgtcggcgtgtactactgtatgcaagcgctgcagaccccgccctggactttcggacaaggaaccaagctggagattaagcgg

SEQ ID NO: 354 - DNA, 849 bp, synthetic construct
  misc_feature 1..849: note = source = /note="Description of Artificial Sequence: Synthetic polynucleotide"
  source 1..849: mol_type = other DNA
atggccctccctgtcaccgccctgctgcttccgctggctcttctgctccacgccgctcggcccgaagtgcagttggtggaatcaggagcagaagtcaagaaacccggagaaagcctgaagatctcgtgcaaagggagcggatactcgttcaccggatcatggattggatggggccgccagatgcctggaaagggtctggaatggatgggaatcatctacccgggggactccgatactcggtactccccgagctttcagggccaggtcaccatctccgccgacaagtccatctccactgcgtatttgcagtggagctcactgaaggcctcggacaccgctatgtactactgcgcccgcggtttcctgaggggcggagattgttgcggcgcccttgatatctggggccaggggaccatggtgaccgtgtcctccggtggtggcggctccggcggaggagggtccgggggaggaggctccgacattgtgatgacccagagccccctgtccctgcccgtgactcctggggagccagcctcgatcagctgccggtcgtcccagtcccttctgcactccaacggctacaactatctcgattggtacctccagaagcctggtcaaagcccgcagctgctgatctacctcggttcaaacagagcttccggggtgccggacagattcagcggatctggatcgggcacagacttcacgctcaagatttcccgcgtggaggccgaggacgtcggcgtgtactactgtatgcaagcgctgcagaccccgccctggactttcggacaaggaaccaagctggagattaagcggggatcgcaccaccatcaccatcatcatcac

SEQ ID NO: 355 - protein, 283 aa, synthetic construct
  REGION 1..283: note = source = /note="Description of Artificial Sequence: Synthetic polypeptide"
MALPVTALLLPLALLLHAARPEVQLVESGAEVKKPGESLKISCKGSGYSFTGSWIGWGRQMPGKGLEWMGIIYPGDSDTRYSPSFQGQVTISADKSISTAYLQWSSLKASDTAMYYCARGFLRGGDCCGALDIWGQGTMVTVSSGGGGSGGGGSGGGGSDIVMTQSPLSLPVTPGEPASISCRSSQSLLHSNGYNYLDWYLQKPGQSPQLLIYLGSNRASGVPDRFSGSGSGTDFTLKISRVEAEDVGVYYCMQALQTPPWTFGQGTKLEIKRGSHHHHHHHH

SEQ ID NO: 356 - protein, 496 aa, synthetic construct
  REGION 1..496: note = source = /note="Description of Artificial Sequence: Synthetic polypeptide"
MALPVTALLLPLALLLHAARPEVQLVESGAEVKKPGESLKISCKGSGYSFTGSWIGWGRQMPGKGLEWMGIIYPGDSDTRYSPSFQGQVTISADKSISTAYLQWSSLKASDTAMYYCARGFLRGGDCCGALDIWGQGTMVTVSSGGGGSGGGGSGGGGSDIVMTQSPLSLPVTPGEPASISCRSSQSLLHSNGYNYLDWYLQKPGQSPQLLIYLGSNRASGVPDRFSGSGSGTDFTLKISRVEAEDVGVYYCMQALQTPPWTFGQGTKLEIKRTTTPAPRPPTPAPTIASQPLSLRPEACRPAAGGAVHTRGLDFACDIYIWAPLAGTCGVLLLSLVITLYCKRGRKKLLYIFKQPFMRPVQTTQEEDGCSCRFPEEEEGGCELRVKFSRSADAPAYKQGQNQLYNELNLGRREEYDVLDKRRGRDPEMGGKPRRKNPQEGLYNELQKDKMAEAYSEIGMKGERRRGKGHDGLYQGLSTATKDTYDALHMQALPPR

SEQ ID NO: 357 - DNA, 1488 bp, synthetic construct
  misc_feature 1..1488: note = source = /note="Description of Artificial Sequence: Synthetic polynucleotide"
  source 1..1488: mol_type = other DNA
atggccctccctgtcaccgccctgctgcttccgctggctcttctgctccacgccgctcggcccgaagtgcagttggtggaatcaggagcagaagtcaagaaacccggagaaagcctgaagatctcgtgcaaagggagcggatactcgttcaccggatcatggattggatggggccgccagatgcctggaaagggtctggaatggatgggaatcatctacccgggggactccgatactcggtactccccgagctttcagggccaggtcaccatctccgccgacaagtccatctccactgcgtatttgcagtggagctcactgaaggcctcggacaccgctatgtactactgcgcccgcggtttcctgaggggcggagattgttgcggcgcccttgatatctggggccaggggaccatggtgaccgtgtcctccggtggtggcggctccggcggaggagggtccgggggaggaggctccgacattgtgatgacccagagccccctgtccctgcccgtgactcctggggagccagcctcgatcagctgccggtcgtcccagtcccttctgcactccaacggctacaactatctcgattggtacctccagaagcctggtcaaagcccgcagctgctgatctacctcggttcaaacagagcttccggggtgccggacagattcagcggatctggatcgggcacagacttcacgctcaagatttcccgcgtggaggccgaggacgtcggcgtgtactactgtatgcaagcgctgcagaccccgccctggactttcggacaaggaaccaagctggagattaagcggaccactaccccagcaccgaggccacccaccccggctcctaccatcgcctcccagcctctgtccctgcgtccggaggcatgtagacccgcagctggtggggccgtgcatacccggggtcttgacttcgcctgcgatatctacatttgggcccctctggctggtacttgcggggtcctgctgctttcactcgtgatcactctttactgtaagcgcggtcggaagaagctgctgtacatctttaagcaacccttcatgaggcctgtgcagactactcaagaggaggacggctgttcatgccggttcccagaggaggaggaaggcggctgcgaactgcgcgtgaaattcagccgcagcgcagatgctccagcctacaagcaggggcagaaccagctctacaacgaactcaatcttggtcggagagaggagtacgacgtgctggacaagcggagaggacgggacccagaaatgggcgggaagccgcgcagaaagaatccccaagagggcctgtacaacgagctccaaaaggataagatggcagaagcctatagcgagattggtatgaaaggggaacgcagaagaggcaaaggccacgacggactgtaccagggactcagcaccgccaccaaggacacctatgacgctcttcacatgcaggccctgccgcctcgg

SEQ ID NO: 358 - protein, 250 aa, synthetic construct
  REGION 1..250: note = source = /note="Description of Artificial Sequence: Synthetic polypeptide"
QVQLQESGPGLVKPSETLSLTCSVSGGSINSYYWSWIRQAPGKGLEWIAFTSHSGNVKYNPSLTGRVTIAVDTSKNQFYLEVTSVTAADTAVYFCARGLDPLFAYDAFEIWGLGTMVTVSSGGGGSGGGGSGGGGSEIVLTQSPLSLPVTPGEPASISCRSSQSLLHSNGYNYLDWYLQKPGQSPQLLIYLGSNRASGVPDRFSGSGSGTDFTLKISRVEAEDVGVYYCMQVLQTPPLTFGGGTKVDIKR

SEQ ID NO: 359 - DNA, 750 bp, synthetic construct
  misc_feature 1..750: note = source = /note="Description of Artificial Sequence: Synthetic polynucleotide"
  source 1..750: mol_type = other DNA
caagtgcaacttcaggaatcaggccccggacttgtgaaaccatcagaaactctctccctcacttgctccgtgagcggggggtccatcaactcctactactggtcgtggattagacaggcccctggaaaggggctggagtggatcgcgttcacttcgcactccggcaacgtcaagtacaacccgtccctgaccggaagagtgaccattgccgtggatacctccaagaaccagttctacctggaagtcacgtcggtgaccgctgctgacaccgccgtgtacttctgcgcacgggggctggacccattgtttgcctacgatgcgttcgaaatctgggggctcggaaccatggtcactgtgtcctccggcggaggcggcagcggtggaggaggcagcggaggaggaggttccgagatcgtgctgacccagagccccctgtccctccccgtgacccctggagaaccggccagcatttcctgccggtcgagccagtccctgttgcattcaaatggctacaactacctggattggtatctgcagaagcccggccagtcaccgcaactgctcatctacctgggaagcaaccgcgcctcgggtgtcccggaccgcttctccggctcggggtctggcactgacttcacactgaagatctccagggtggaggccgaggacgtgggagtgtattactgtatgcaagtgctgcagaccccgcctctgaccttcggcggtggaactaaggtcgacatcaagcgg

SEQ ID NO: 360 - DNA, 843 bp, synthetic construct
  misc_feature 1..843: note = source = /note="Description of Artificial Sequence: Synthetic polynucleotide"
  source 1..843: mol_type = other DNA
atggccctccctgtcaccgccctgctgcttccgctggctcttctgctccacgccgctcggccccaagtgcaacttcaggaatcaggccccggacttgtgaaaccatcagaaactctctccctcacttgctccgtgagcggggggtccatcaactcctactactggtcgtggattagacaggcccctggaaaggggctggagtggatcgcgttcacttcgcactccggcaacgtcaagtacaacccgtccctgaccggaagagtgaccattgccgtggatacctccaagaaccagttctacctggaagtcacgtcggtgaccgctgctgacaccgccgtgtacttctgcgcacgggggctggacccattgtttgcctacgatgcgttcgaaatctgggggctcggaaccatggtcactgtgtcctccggcggaggcggcagcggtggaggaggcagcggaggaggaggttccgagatcgtgctgacccagagccccctgtccctccccgtgacccctggagaaccggccagcatttcctgccggtcgagccagtccctgttgcattcaaatggctacaactacctggattggtatctgcagaagcccggccagtcaccgcaactgctcatctacctgggaagcaaccgcgcctcgggtgtcccggaccgcttctccggctcggggtctggcactgacttcacactgaagatctccagggtggaggccgaggacgtgggagtgtattactgtatgcaagtgctgcagaccccgcctctgaccttcggcggtggaactaaggtcgacatcaagcggggatcgcaccaccatcaccatcatcatcac

SEQ ID NO: 361 - protein, 281 aa, synthetic construct
  REGION 1..281: note = source = /note="Description of Artificial Sequence: Synthetic polypeptide"
MALPVTALLLPLALLLHAARPQVQLQESGPGLVKPSETLSLTCSVSGGSINSYYWSWIRQAPGKGLEWIAFTSHSGNVKYNPSLTGRVTIAVDTSKNQFYLEVTSVTAADTAVYFCARGLDPLFAYDAFEIWGLGTMVTVSSGGGGSGGGGSGGGGSEIVLTQSPLSLPVTPGEPASISCRSSQSLLHSNGYNYLDWYLQKPGQSPQLLIYLGSNRASGVPDRFSGSGSGTDFTLKISRVEAEDVGVYYCMQVLQTPPLTFGGGTKVDIKRGSHHHHHHHH

SEQ ID NO: 362 - protein, 494 aa, synthetic construct
  REGION 1..494: note = source = /note="Description of Artificial Sequence: Synthetic polypeptide"
MALPVTALLLPLALLLHAARPQVQLQESGPGLVKPSETLSLTCSVSGGSINSYYWSWIRQAPGKGLEWIAFTSHSGNVKYNPSLTGRVTIAVDTSKNQFYLEVTSVTAADTAVYFCARGLDPLFAYDAFEIWGLGTMVTVSSGGGGSGGGGSGGGGSEIVLTQSPLSLPVTPGEPASISCRSSQSLLHSNGYNYLDWYLQKPGQSPQLLIYLGSNRASGVPDRFSGSGSGTDFTLKISRVEAEDVGVYYCMQVLQTPPLTFGGGTKVDIKRTTTPAPRPPTPAPTIASQPLSLRPEACRPAAGGAVHTRGLDFACDIYIWAPLAGTCGVLLLSLVITLYCKRGRKKLLYIFKQPFMRPVQTTQEEDGCSCRFPEEEEGGCELRVKFSRSADAPAYKQGQNQLYNELNLGRREEYDVLDKRRGRDPEMGGKPRRKNPQEGLYNELQKDKMAEAYSEIGMKGERRRGKGHDGLYQGLSTATKDTYDALHMQALPPR

SEQ ID NO: 363 - DNA, 1482 bp, synthetic construct
  misc_feature 1..1482: note = source = /note="Description of Artificial Sequence: Synthetic polynucleotide"
  source 1..1482: mol_type = other DNA
atggccctccctgtcaccgccctgctgcttccgctggctcttctgctccacgccgctcggccccaagtgcaacttcaggaatcaggccccggacttgtgaaaccatcagaaactctctccctcacttgctccgtgagcggggggtccatcaactcctactactggtcgtggattagacaggcccctggaaaggggctggagtggatcgcgttcacttcgcactccggcaacgtcaagtacaacccgtccctgaccggaagagtgaccattgccgtggatacctccaagaaccagttctacctggaagtcacgtcggtgaccgctgctgacaccgccgtgtacttctgcgcacgggggctggacccattgtttgcctacgatgcgttcgaaatctgggggctcggaaccatggtcactgtgtcctccggcggaggcggcagcggtggaggaggcagcggaggaggaggttccgagatcgtgctgacccagagccccctgtccctccccgtgacccctggagaaccggccagcatttcctgccggtcgagccagtccctgttgcattcaaatggctacaactacctggattggtatctgcagaagcccggccagtcaccgcaactgctcatctacctgggaagcaaccgcgcctcgggtgtcccggaccgcttctccggctcggggtctggcactgacttcacactgaagatctccagggtggaggccgaggacgtgggagtgtattactgtatgcaagtgctgcagaccccgcctctgaccttcggcggtggaactaaggtcgacatcaagcggaccactaccccagcaccgaggccacccaccccggctcctaccatcgcctcccagcctctgtccctgcgtccggaggcatgtagacccgcagctggtggggccgtgcatacccggggtcttgacttcgcctgcgatatctacatttgggcccctctggctggtacttgcggggtcctgctgctttcactcgtgatcactctttactgtaagcgcggtcggaagaagctgctgtacatctttaagcaacccttcatgaggcctgtgcagactactcaagaggaggacggctgttcatgccggttcccagaggaggaggaaggcggctgcgaactgcgcgtgaaattcagccgcagcgcagatgctccagcctacaagcaggggcagaaccagctctacaacgaactcaatcttggtcggagagaggagtacgacgtgctggacaagcggagaggacgggacccagaaatgggcgggaagccgcgcagaaagaatccccaagagggcctgtacaacgagctccaaaaggataagatggcagaagcctatagcgagattggtatgaaaggggaacgcagaagaggcaaaggccacgacggactgtaccagggactcagcaccgccaccaaggacacctatgacgctcttcacatgcaggccctgccgcctcgg

SEQ ID NO: 364 - protein, 247 aa, synthetic construct
  REGION 1..247: note = source = /note="Description of Artificial Sequence: Synthetic polypeptide"
EVQLVESGGGLVKPGGSLRLSCAASGFTFSDYYMSWIRQAPGKGLEWVSYISSSGSTIYYADSVKGRFTISRDNAKNSLYLQMNSLRAEDTAVYYCARDDFWSGSVDYWGQGTLVTVSSGGGGSGGGGSGGGGSGGGGSSYVLTQPPSVSVAPGKTATITCGGTNIGSKNVHWYQQKPGQAPVLAIYYDSDRPSGIPERFSGSNSGNTATLTISRVEAGDEADYFCQVWDSSSDHWVFGGGTKLTVL

SEQ ID NO: 365 - DNA, 741 bp, synthetic construct
  misc_feature 1..741: note = source = /note="Description of Artificial Sequence: Synthetic polynucleotide"
  source 1..741: mol_type = other DNA
gaagtgcagttggtggaatctggtggtggactcgtgaaacctggaggaagcttgcgcctgtcttgcgcggcctccggcttcactttctcggattactacatgtcctggattagacaggctccggggaagggactcgaatgggtgtcctacatttcatcaagcggcagcaccatctactatgcggactccgtgaaggggcggttcactatttcccgggataacgcaaagaacagcctgtaccttcaaatgaattcactgcgcgccgaggacaccgccgtgtactattgcgcccgggatgacttctggtcggggtccgtggactactggggccaggggaccctggtcaccgtgtcctcgggaggaggaggaagcgggggaggcggttccgggggcggcggctcgggcggcggtggctccagctacgtgctcacccagccgccctccgtgtccgtggccccgggaaagaccgccaccatcacctgtggaggaacgaacatcggctccaagaacgtccattggtaccagcagaagcccggacaggcccccgtgctggcaatctactacgactccgaccgcccaagcggtatccctgaaaggttctccggctccaacagcggaaacactgcgactctgaccatctcaagagtggaggctggcgatgaggccgactacttctgccaagtctgggactcgtcctcggaccactgggtgtttgggggaggcaccaagctgactgtcctg

SEQ ID NO: 366 - DNA, 834 bp, synthetic construct
  misc_feature 1..834: note = source = /note="Description of Artificial Sequence: Synthetic polynucleotide"
  source 1..834: mol_type = other DNA
atggccctccctgtcaccgccctgctgcttccgctggctcttctgctccacgccgctcggcccgaagtgcagttggtggaatctggtggtggactcgtgaaacctggaggaagcttgcgcctgtcttgcgcggcctccggcttcactttctcggattactacatgtcctggattagacaggctccggggaagggactcgaatgggtgtcctacatttcatcaagcggcagcaccatctactatgcggactccgtgaaggggcggttcactatttcccgggataacgcaaagaacagcctgtaccttcaaatgaattcactgcgcgccgaggacaccgccgtgtactattgcgcccgggatgacttctggtcggggtccgtggactactggggccaggggaccctggtcaccgtgtcctcgggaggaggaggaagcgggggaggcggttccgggggcggcggctcgggcggcggtggctccagctacgtgctcacccagccgccctccgtgtccgtggccccgggaaagaccgccaccatcacctgtggaggaacgaacatcggctccaagaacgtccattggtaccagcagaagcccggacaggcccccgtgctggcaatctactacgactccgaccgcccaagcggtatccctgaaaggttctccggctccaacagcggaaacactgcgactctgaccatctcaagagtggaggctggcgatgaggccgactacttctgccaagtctgggactcgtcctcggaccactgggtgtttgggggaggcaccaagctgactgtcctgggatcgcaccaccatcaccatcatcatcac

SEQ ID NO: 367 - protein, 278 aa, synthetic construct
  REGION 1..278: note = source = /note="Description of Artificial Sequence: Synthetic polypeptide"
MALPVTALLLPLALLLHAARPEVQLVESGGGLVKPGGSLRLSCAASGFTFSDYYMSWIRQAPGKGLEWVSYISSSGSTIYYADSVKGRFTISRDNAKNSLYLQMNSLRAEDTAVYYCARDDFWSGSVDYWGQGTLVTVSSGGGGSGGGGSGGGGSGGGGSSYVLTQPPSVSVAPGKTATITCGGTNIGSKNVHWYQQKPGQAPVLAIYYDSDRPSGIPERFSGSNSGNTATLTISRVEAGDEADYFCQVWDSSSDHWVFGGGTKLTVLGSHHHHHHHH

SEQ ID NO: 368 - protein, 491 aa, synthetic construct
  REGION 1..491: note = source = /note="Description of Artificial Sequence: Synthetic polypeptide"
MALPVTALLLPLALLLHAARPEVQLVESGGGLVKPGGSLRLSCAASGFTFSDYYMSWIRQAPGKGLEWVSYISSSGSTIYYADSVKGRFTISRDNAKNSLYLQMNSLRAEDTAVYYCARDDFWSGSVDYWGQGTLVTVSSGGGGSGGGGSGGGGSGGGGSSYVLTQPPSVSVAPGKTATITCGGTNIGSKNVHWYQQKPGQAPVLAIYYDSDRPSGIPERFSGSNSGNTATLTISRVEAGDEADYFCQVWDSSSDHWVFGGGTKLTVLTTTPAPRPPTPAPTIASQPLSLRPEACRPAAGGAVHTRGLDFACDIYIWAPLAGTCGVLLLSLVITLYCKRGRKKLLYIFKQPFMRPVQTTQEEDGCSCRFPEEEEGGCELRVKFSRSADAPAYKQGQNQLYNELNLGRREEYDVLDKRRGRDPEMGGKPRRKNPQEGLYNELQKDKMAEAYSEIGMKGERRRGKGHDGLYQGLSTATKDTYDALHMQALPPR

SEQ ID NO: 369 - DNA, 1473 bp, synthetic construct
  misc_feature 1..1473: note = source = /note="Description of Artificial Sequence: Synthetic polynucleotide"
  source 1..1473: mol_type = other DNA
atggccctccctgtcaccgccctgctgcttccgctggctcttctgctccacgccgctcggcccgaagtgcagttggtggaatctggtggtggactcgtgaaacctggaggaagcttgcgcctgtcttgcgcggcctccggcttcactttctcggattactacatgtcctggattagacaggctccggggaagggactcgaatgggtgtcctacatttcatcaagcggcagcaccatctactatgcggactccgtgaaggggcggttcactatttcccgggataacgcaaagaacagcctgtaccttcaaatgaattcactgcgcgccgaggacaccgccgtgtactattgcgcccgggatgacttctggtcggggtccgtggactactggggccaggggaccctggtcaccgtgtcctcgggaggaggaggaagcgggggaggcggttccgggggcggcggctcgggcggcggtggctccagctacgtgctcacccagccgccctccgtgtccgtggccccgggaaagaccgccaccatcacctgtggaggaacgaacatcggctccaagaacgtccattggtaccagcagaagcccggacaggcccccgtgctggcaatctactacgactccgaccgcccaagcggtatccctgaaaggttctccggctccaacagcggaaacactgcgactctgaccatctcaagagtggaggctggcgatgaggccgactacttctgccaagtctgggactcgtcctcggaccactgggtgtttgggggaggcaccaagctgactgtcctgaccactaccccagcaccgaggccacccaccccggctcctaccatcgcctcccagcctctgtccctgcgtccggaggcatgtagacccgcagctggtggggccgtgcatacccggggtcttgacttcgcctgcgatatctacatttgggcccctctggctggtacttgcggggtcctgctgctttcactcgtgatcactctttactgtaagcgcggtcggaagaagctgctgtacatctttaagcaacccttcatgaggcctgtgcagactactcaagaggaggacggctgttcatgccggttcccagaggaggaggaaggcggctgcgaactgcgcgtgaaattcagccgcagcgcagatgctccagcctacaagcaggggcagaaccagctctacaacgaactcaatcttggtcggagagaggagtacgacgtgctggacaagcggagaggacgggacccagaaatgggcgggaagccgcgcagaaagaatccccaagagggcctgtacaacgagctccaaaaggataagatggcagaagcctatagcgagattggtatgaaaggggaacgcagaagaggcaaaggccacgacggactgtaccagggactcagcaccgccaccaaggacacctatgacgctcttcacatgcaggccctgccgcctcgg

SEQ ID NO: 370 - protein, 250 aa, synthetic construct
  REGION 1..250: note = source = /note="Description of Artificial Sequence: Synthetic polypeptide"
QVQLVQSGAEVKKPGASVKVSCKASGYTFTSYYMHWVRQAPGQGLEWMGIINPSGGSTSYAQKFQGRVTMTRDTSTSTVYMELSSLRSEDTAVYYCAREDDSSGYTSPFDYWGQGTLVTVSSGGGGSGGGGSGGGGSGGGRSSYELTQPPSVSVAPGETASIACGGHNIRSKNVHWYQQKPGQAPVLVISYDGDRPSGIPERFSGSNLGSTATLTISRVEAGDEADYYCQVWDSDSDHYVFGTGTKVTVL

SEQ ID NO: 371 - DNA, 750 bp, synthetic construct
  misc_feature 1..750: note = source = /note="Description of Artificial Sequence: Synthetic polynucleotide"
  source 1..750: mol_type = other DNA
caagtccaactcgtccagtccggtgcagaagtcaagaaacccggagcttccgtgaaagtgtcctgcaaggcctcggggtacacattcacctcctactacatgcactgggtgcgccaggccccgggccagggactggaatggatgggaatcattaacccgtccggcggatcgaccagctacgcccagaagtttcagggacgcgtgaccatgacccgggacactagcaccagcactgtgtacatggaactgagctcactgcggtccgaggacactgcggtgtactattgcgcccgggaggacgattcctccgggtacacttcgcccttcgactattggggacagggaaccttggtcaccgtgtcatcgggtggtggaggaagcggaggaggcggctccggcggcgggggttcaggcggtggcagaagctcctacgaactgacccagcctccgtccgtgtccgtggcccccggcgaaaccgcctcgatcgcgtgtggagggcacaatattcggagcaagaacgtgcattggtaccagcagaagccgggacaggcaccagtgctcgtgatctcctacgatggggacaggccttctggcatccctgagagattcagcgggtccaacctgggctccactgctaccctgaccatctcgcgcgtggaagccggggatgaggccgactactactgccaagtctgggactccgacagcgatcactacgtgttcggaactggaaccaaggtcacggtgctt

SEQ ID NO: 372 - DNA, 843 bp, synthetic construct
  misc_feature 1..843: note = source = /note="Description of Artificial Sequence: Synthetic polynucleotide"
  source 1..843: mol_type = other DNA
atggccctccctgtcaccgccctgctgcttccgctggctcttctgctccacgccgctcggccccaagtccaactcgtccagtccggtgcagaagtcaagaaacccggagcttccgtgaaagtgtcctgcaaggcctcggggtacacattcacctcctactacatgcactgggtgcgccaggccccgggccagggactggaatggatgggaatcattaacccgtccggcggatcgaccagctacgcccagaagtttcagggacgcgtgaccatgacccgggacactagcaccagcactgtgtacatggaactgagctcactgcggtccgaggacactgcggtgtactattgcgcccgggaggacgattcctccgggtacacttcgcccttcgactattggggacagggaaccttggtcaccgtgtcatcgggtggtggaggaagcggaggaggcggctccggcggcgggggttcaggcggtggcagaagctcctacgaactgacccagcctccgtccgtgtccgtggcccccggcgaaaccgcctcgatcgcgtgtggagggcacaatattcggagcaagaacgtgcattggtaccagcagaagccgggacaggcaccagtgctcgtgatctcctacgatggggacaggccttctggcatccctgagagattcagcgggtccaacctgggctccactgctaccctgaccatctcgcgcgtggaagccggggatgaggccgactactactgccaagtctgggactccgacagcgatcactacgtgttcggaactggaaccaaggtcacggtgcttggatcgcaccaccatcaccatcatcatcac

SEQ ID NO: 373 - protein, 281 aa, synthetic construct
  REGION 1..281: note = source = /note="Description of Artificial Sequence: Synthetic polypeptide"
MALPVTALLLPLALLLHAARPQVQLVQSGAEVKKPGASVKVSCKASGYTFTSYYMHWVRQAPGQGLEWMGIINPSGGSTSYAQKFQGRVTMTRDTSTSTVYMELSSLRSEDTAVYYCAREDDSSGYTSPFDYWGQGTLVTVSSGGGGSGGGGSGGGGSGGGRSSYELTQPPSVSVAPGETASIACGGHNIRSKNVHWYQQKPGQAPVLVISYDGDRPSGIPERFSGSNLGSTATLTISRVEAGDEADYYCQVWDSDSDHYVFGTGTKVTVLGSHHHHHHHH

SEQ ID NO: 374 - protein, 494 aa, synthetic construct
  REGION 1..494: note = source = /note="Description of Artificial Sequence: Synthetic polypeptide"
MALPVTALLLPLALLLHAARPQVQLVQSGAEVKKPGASVKVSCKASGYTFTSYYMHWVRQAPGQGLEWMGIINPSGGSTSYAQKFQGRVTMTRDTSTSTVYMELSSLRSEDTAVYYCAREDDSSGYTSPFDYWGQGTLVTVSSGGGGSGGGGSGGGGSGGGRSSYELTQPPSVSVAPGETASIACGGHNIRSKNVHWYQQKPGQAPVLVISYDGDRPSGIPERFSGSNLGSTATLTISRVEAGDEADYYCQVWDSDSDHYVFGTGTKVTVLTTTPAPRPPTPAPTIASQPLSLRPEACRPAAGGAVHTRGLDFACDIYIWAPLAGTCGVLLLSLVITLYCKRGRKKLLYIFKQPFMRPVQTTQEEDGCSCRFPEEEEGGCELRVKFSRSADAPAYKQGQNQLYNELNLGRREEYDVLDKRRGRDPEMGGKPRRKNPQEGLYNELQKDKMAEAYSEIGMKGERRRGKGHDGLYQGLSTATKDTYDALHMQALPPR

SEQ ID NO: 375 - DNA, 1482 bp, synthetic construct
  misc_feature 1..1482: note = source = /note="Description of Artificial Sequence: Synthetic polynucleotide"
  source 1..1482: mol_type = other DNA
atggccctccctgtcaccgccctgctgcttccgctggctcttctgctccacgccgctcggccccaagtccaactcgtccagtccggtgcagaagtcaagaaacccggagcttccgtgaaagtgtcctgcaaggcctcggggtacacattcacctcctactacatgcactgggtgcgccaggccccgggccagggactggaatggatgggaatcattaacccgtccggcggatcgaccagctacgcccagaagtttcagggacgcgtgaccatgacccgggacactagcaccagcactgtgtacatggaactgagctcactgcggtccgaggacactgcggtgtactattgcgcccgggaggacgattcctccgggtacacttcgcccttcgactattggggacagggaaccttggtcaccgtgtcatcgggtggtggaggaagcggaggaggcggctccggcggcgggggttcaggcggtggcagaagctcctacgaactgacccagcctccgtccgtgtccgtggcccccggcgaaaccgcctcgatcgcgtgtggagggcacaatattcggagcaagaacgtgcattggtaccagcagaagccgggacaggcaccagtgctcgtgatctcctacgatggggacaggccttctggcatccctgagagattcagcgggtccaacctgggctccactgctaccctgaccatctcgcgcgtggaagccggggatgaggccgactactactgccaagtctgggactccgacagcgatcactacgtgttcggaactggaaccaaggtcacggtgcttaccactaccccagcaccgaggccacccaccccggctcctaccatcgcctcccagcctctgtccctgcgtccggaggcatgtagacccgcagctggtggggccgtgcatacccggggtcttgacttcgcctgcgatatctacatttgggcccctctggctggtacttgcggggtcctgctgctttcactcgtgatcactctttactgtaagcgcggtcggaagaagctgctgtacatctttaagcaacccttcatgaggcctgtgcagactactcaagaggaggacggctgttcatgccggttcccagaggaggaggaaggcggctgcgaactgcgcgtgaaattcagccgcagcgcagatgctccagcctacaagcaggggcagaaccagctctacaacgaactcaatcttggtcggagagaggagtacgacgtgctggacaagcggagaggacgggacccagaaatgggcgggaagccgcgcagaaagaatccccaagagggcctgtacaacgagctccaaaaggataagatggcagaagcctatagcgagattggtatgaaaggggaacgcagaagaggcaaaggccacgacggactgtaccagggactcagcaccgccaccaaggacacctatgacgctcttcacatgcaggccctgccgcctcgg

SEQ ID NO: 376 - protein, 252 aa, synthetic construct
  REGION 1..252: note = source = /note="Description of Artificial Sequence: Synthetic polypeptide"
EVQLVESGAEVKKPGASVKVSCKASGYTFTGYYMHWVRQAPGQGLEWMGWINPNSGGTNYAQKFQGRVTMTRDTSISTAYMELSRLRSDDTAVYYCAREPASSSWYGYYYYMDVWGKGTLVTVSSGGGGSGGGGSGGGGSGGGGSDIQMTQSPSSLSASVGDRVTITCRASQSINTYLNWYQQKPGKPPKLLIYAASNLQSGVPSRFSGSGSGTHFTLTISSLQPDDFATYYCQQSYSSLLTFGGGTKLEIK

SEQ ID NO: 377 - DNA, 756 bp, synthetic construct
  misc_feature 1..756: note = source = /note="Description of Artificial Sequence: Synthetic polynucleotide"
  source 1..756: mol_type = other DNA
gaagtgcagttggtggaatcaggagcagaagtcaagaaacccggagcatcagtcaaagtgtcctgcaaggcctccgggtacactttcactggttactacatgcattgggtgcgccaggcgcccggacaaggactcgagtggatgggctggattaaccccaactccggcggaaccaactacgcccagaagttccagggtagagtgacgatgactcgggacaccagcatctccaccgcgtacatggagctgtcgagactgaggtccgacgataccgccgtgtactactgcgcccgggaaccggcttcctcgtcttggtacggatattactattacatggatgtctggggaaagggaacacttgtcactgtgtccagcggtggcggaggcagcggcggtggagggtccggcggcggcggatcgggagggggaggcagcgacatccagatgactcagtccccatcctcgctgtcggctagcgtgggcgaccgcgtgaccattacctgtcgggccagccaatccatcaacacctacctgaactggtaccagcagaagccggggaagcctccaaagctgctcatctacgcggcctcaaatctgcaatccggggtgccttcccggttctccggttccggttcggggacccacttcactctgaccattagctcactgcaaccggacgactttgccacctactactgccagcagagctactcctccctcctgaccttcggcggaggaaccaagctcgagatcaag

SEQ ID NO: 378 - DNA, 849 bp, synthetic construct
  misc_feature 1..849: note = source = /note="Description of Artificial Sequence: Synthetic polynucleotide"
  source 1..849: mol_type = other DNA
atggccctccctgtcaccgccctgctgcttccgctggctcttctgctccacgccgctcggcccgaagtgcagttggtggaatcaggagcagaagtcaagaaacccggagcatcagtcaaagtgtcctgcaaggcctccgggtacactttcactggttactacatgcattgggtgcgccaggcgcccggacaaggactcgagtggatgggctggattaaccccaactccggcggaaccaactacgcccagaagttccagggtagagtgacgatgactcgggacaccagcatctccaccgcgtacatggagctgtcgagactgaggtccgacgataccgccgtgtactactgcgcccgggaaccggcttcctcgtcttggtacggatattactattacatggatgtctggggaaagggaacacttgtcactgtgtccagcggtggcggaggcagcggcggtggagggtccggcggcggcggatcgggagggggaggcagcgacatccagatgactcagtccccatcctcgctgtcggctagcgtgggcgaccgcgtgaccattacctgtcgggccagccaatccatcaacacctacctgaactggtaccagcagaagccggggaagcctccaaagctgctcatctacgcggcctcaaatctgcaatccggggtgccttcccggttctccggttccggttcggggacccacttcactctgaccattagctcactgcaaccggacgactttgccacctactactgccagcagagctactcctccctcctgaccttcggcggaggaaccaagctcgagatcaagggatcgcaccaccatcaccatcatcatcac

SEQ ID NO: 379 - protein, 283 aa, synthetic construct
  REGION 1..283: note = source = /note="Description of Artificial Sequence: Synthetic polypeptide"
MALPVTALLLPLALLLHAARPEVQLVESGAEVKKPGASVKVSCKASGYTFTGYYMHWVRQAPGQGLEWMGWINPNSGGTNYAQKFQGRVTMTRDTSISTAYMELSRLRSDDTAVYYCAREPASSSWYGYYYYMDVWGKGTLVTVSSGGGGSGGGGSGGGGSGGGGSDIQMTQSPSSLSASVGDRVTITCRASQSINTYLNWYQQKPGKPPKLLIYAASNLQSGVPSRFSGSGSGTHFTLTISSLQPDDFATYYCQQSYSSLLTFGGGTKLEIKGSHHHHHHHH

SEQ ID NO: 380 - protein, 496 aa, synthetic construct
  REGION 1..496: note = source = /note="Description of Artificial Sequence: Synthetic polypeptide"
MALPVTALLLPLALLLHAARPEVQLVESGAEVKKPGASVKVSCKASGYTFTGYYMHWVRQAPGQGLEWMGWINPNSGGTNYAQKFQGRVTMTRDTSISTAYMELSRLRSDDTAVYYCAREPASSSWYGYYYYMDVWGKGTLVTVSSGGGGSGGGGSGGGGSGGGGSDIQMTQSPSSLSASVGDRVTITCRASQSINTYLNWYQQKPGKPPKLLIYAASNLQSGVPSRFSGSGSGTHFTLTISSLQPDDFATYYCQQSYSSLLTFGGGTKLEIKTTTPAPRPPTPAPTIASQPLSLRPEACRPAAGGAVHTRGLDFACDIYIWAPLAGTCGVLLLSLVITLYCKRGRKKLLYIFKQPFMRPVQTTQEEDGCSCRFPEEEEGGCELRVKFSRSADAPAYKQGQNQLYNELNLGRREEYDVLDKRRGRDPEMGGKPRRKNPQEGLYNELQKDKMAEAYSEIGMKGERRRGKGHDGLYQGLSTATKDTYDALHMQALPPR

SEQ ID NO: 381 - DNA, 1488 bp, synthetic construct
  misc_feature 1..1488: note = source = /note="Description of Artificial Sequence: Synthetic polynucleotide"
  source 1..1488: mol_type = other DNA
atggccctccctgtcaccgccctgctgcttccgctggctcttctgctccacgccgctcggcccgaagtgcagttggtggaatcaggagcagaagtcaagaaacccggagcatcagtcaaagtgtcctgcaaggcctccgggtacactttcactggttactacatgcattgggtgcgccaggcgcccggacaaggactcgagtggatgggctggattaaccccaactccggcggaaccaactacgcccagaagttccagggtagagtgacgatgactcgggacaccagcatctccaccgcgtacatggagctgtcgagactgaggtccgacgataccgccgtgtactactgcgcccgggaaccggcttcctcgtcttggtacggatattactattacatggatgtctggggaaagggaacacttgtcactgtgtccagcggtggcggaggcagcggcggtggagggtccggcggcggcggatcgggagggggaggcagcgacatccagatgactcagtccccatcctcgctgtcggctagcgtgggcgaccgcgtgaccattacctgtcgggccagccaatccatcaacacctacctgaactggtaccagcagaagccggggaagcctccaaagctgctcatctacgcggcctcaaatctgcaatccggggtgccttcccggttctccggttccggttcggggacccacttcactctgaccattagctcactgcaaccggacgactttgccacctactactgccagcagagctactcctccctcctgaccttcggcggaggaaccaagctcgagatcaagaccactaccccagcaccgaggccacccaccccggctcctaccatcgcctcccagcctctgtccctgcgtccggaggcatgtagacccgcagctggtggggccgtgcatacccggggtcttgacttcgcctgcgatatctacatttgggcccctctggctggtacttgcggggtcctgctgctttcactcgtgatcactctttactgtaagcgcggtcggaagaagctgctgtacatctttaagcaacccttcatgaggcctgtgcagactactcaagaggaggacggctgttcatgccggttcccagaggaggaggaaggcggctgcgaactgcgcgtgaaattcagccgcagcgcagatgctccagcctacaagcaggggcagaaccagctctacaacgaactcaatcttggtcggagagaggagtacgacgtgctggacaagcggagaggacgggacccagaaatgggcgggaagccgcgcagaaagaatccccaagagggcctgtacaacgagctccaaaaggataagatggcagaagcctatagcgagattggtatgaaaggggaacgcagaagaggcaaaggccacgacggactgtaccagggactcagcaccgccaccaaggacacctatgacgctcttcacatgcaggccctgccgcctcgg

SEQ ID NO: 382 - protein, 252 aa, synthetic construct
  REGION 1..252: note = source = /note="Description of Artificial Sequence: Synthetic polypeptide"
QVQLVQSGAEVKKPGASVKVSCKASGYTFTSYDINWVRQATGQGLEWMGWMNPNSGNTGYAQKFQGRVTMTRNTSISTAYMELSSLRSEDTAVYYCARGDSNYWSYYGMDVWGQGTLVTVSSGGGGSGGGGSGGGGSGGGGSQSVLTQPRSVSGSPGQSVTISCTGTSSDVGGYNYVSWYQQHPGEAPKLIIYDADKRPSGISNRFSSGKSGNTASLTISGLQVEDEADYYCCSYAGGSTWVFGGGTKVTVL

SEQ ID NO: 383 - DNA, 756 bp, synthetic construct
  misc_feature 1..756: note = source = /note="Description of Artificial Sequence: Synthetic polynucleotide"
  source 1..756: mol_type = other DNA
caagtccaactcgtccagtccggtgcagaagtcaagaaacccggagcttccgtgaaagtgtcctgcaaggcctcgggttacaccttcacctcctacgacattaactgggtgcgccaggccactgggcagggactggaatggatgggctggatgaaccctaactcgggcaacaccggctatgcccagaagtttcagggacgcgtgacgatgacccggaatacctccatctcaaccgcctacatggaactgagcagcctgaggtccgaggatactgcagtgtactactgcgctcggggagactccaactattggtcctactacggaatggacgtgtggggccagggaaccctcgtcactgtgtcgagcgggggaggcggttcagggggcggcggaagcggaggcggagggtccggcggaggaggttctcagagcgtgctgactcaaccgagatccgtgtccgggagcccgggccagtcagtgactatctcgtgcaccgggaccagctccgacgtgggagggtacaactacgtgtcgtggtaccagcagcaccccggagaggcgccaaagttgattatctacgacgccgataagcgcccttcgggaatctccaaccggttctcctccgggaagtccggcaacactgcctccctgaccatcagcggacttcaagtggaggacgaagcggattactactgctgttcatacgccggcggatcgacctgggtgttcggcggtggtaccaaggtcacagtgctg

SEQ ID NO: 384 - DNA, 849 bp, synthetic construct
  misc_feature 1..849: note = source = /note="Description of Artificial Sequence: Synthetic polynucleotide"
  source 1..849: mol_type = other DNA
atggccctccctgtcaccgccctgctgcttccgctggctcttctgctccacgccgctcggccccaagtccaactcgtccagtccggtgcagaagtcaagaaacccggagcttccgtgaaagtgtcctgcaaggcctcgggttacaccttcacctcctacgacattaactgggtgcgccaggccactgggcagggactggaatggatgggctggatgaaccctaactcgggcaacaccggctatgcccagaagtttcagggacgcgtgacgatgacccggaatacctccatctcaaccgcctacatggaactgagcagcctgaggtccgaggatactgcagtgtactactgcgctcggggagactccaactattggtcctactacggaatggacgtgtggggccagggaaccctcgtcactgtgtcgagcgggggaggcggttcagggggcggcggaagcggaggcggagggtccggcggaggaggttctcagagcgtgctgactcaaccgagatccgtgtccgggagcccgggccagtcagtgactatctcgtgcaccgggaccagctccgacgtgggagggtacaactacgtgtcgtggtaccagcagcaccccggagaggcgccaaagttgattatctacgacgccgataagcgcccttcgggaatctccaaccggttctcctccgggaagtccggcaacactgcctccctgaccatcagcggacttcaagtggaggacgaagcggattactactgctgttcatacgccggcggatcgacctgggtgttcggcggtggtaccaaggtcacagtgctgggatcgcaccaccatcaccatcatcatcac

SEQ ID NO: 385 - protein, 283 aa, synthetic construct
  REGION 1..283: note = source = /note="Description of Artificial Sequence: Synthetic polypeptide"
MALPVTALLLPLALLLHAARPQVQLVQSGAEVKKPGASVKVSCKASGYTFTSYDINWVRQATGQGLEWMGWMNPNSGNTGYAQKFQGRVTMTRNTSISTAYMELSSLRSEDTAVYYCARGDSNYWSYYGMDVWGQGTLVTVSSGGGGSGGGGSGGGGSGGGGSQSVLTQPRSVSGSPGQSVTISCTGTSSDVGGYNYVSWYQQHPGEAPKLIIYDADKRPSGISNRFSSGKSGNTASLTISGLQVEDEADYYCCSYAGGSTWVFGGGTKVTVLGSHHHHHHHH

SEQ ID NO: 386 - protein, 496 aa, synthetic construct
  REGION 1..496: note = source = /note="Description of Artificial Sequence: Synthetic polypeptide"
MALPVTALLLPLALLLHAARPQVQLVQSGAEVKKPGASVKVSCKASGYTFTSYDINWVRQATGQGLEWMGWMNPNSGNTGYAQKFQGRVTMTRNTSISTAYMELSSLRSEDTAVYYCARGDSNYWSYYGMDVWGQGTLVTVSSGGGGSGGGGSGGGGSGGGGSQSVLTQPRSVSGSPGQSVTISCTGTSSDVGGYNYVSWYQQHPGEAPKLIIYDADKRPSGISNRFSSGKSGNTASLTISGLQVEDEADYYCCSYAGGSTWVFGGGTKVTVLTTTPAPRPPTPAPTIASQPLSLRPEACRPAAGGAVHTRGLDFACDIYIWAPLAGTCGVLLLSLVITLYCKRGRKKLLYIFKQPFMRPVQTTQEEDGCSCRFPEEEEGGCELRVKFSRSADAPAYKQGQNQLYNELNLGRREEYDVLDKRRGRDPEMGGKPRRKNPQEGLYNELQKDKMAEAYSEIGMKGERRRGKGHDGLYQGLSTATKDTYDALHMQALPPR

SEQ ID NO: 387 - DNA, 1488 bp, synthetic construct
  misc_feature 1..1488: note = source = /note="Description of Artificial Sequence: Synthetic polynucleotide"
  source 1..1488: mol_type = other DNA
atggccctccctgtcaccgccctgctgcttccgctggctcttctgctccacgccgctcggccccaagtccaactcgtccagtccggtgcagaagtcaagaaacccggagcttccgtgaaagtgtcctgcaaggcctcgggttacaccttcacctcctacgacattaactgggtgcgccaggccactgggcagggactggaatggatgggctggatgaaccctaactcgggcaacaccggctatgcccagaagtttcagggacgcgtgacgatgacccggaatacctccatctcaaccgcctacatggaactgagcagcctgaggtccgaggatactgcagtgtactactgcgctcggggagactccaactattggtcctactacggaatggacgtgtggggccagggaaccctcgtcactgtgtcgagcgggggaggcggttcagggggcggcggaagcggaggcggagggtccggcggaggaggttctcagagcgtgctgactcaaccgagatccgtgtccgggagcccgggccagtcagtgactatctcgtgcaccgggaccagctccgacgtgggagggtacaactacgtgtcgtggtaccagcagcaccccggagaggcgccaaagttgattatctacgacgccgataagcgcccttcgggaatctccaaccggttctcctccgggaagtccggcaacactgcctccctgaccatcagcggacttcaagtggaggacgaagcggattactactgctgttcatacgccggcggatcgacctgggtgttcggcggtggtaccaaggtcacagtgctgaccactaccccagcaccgaggccacccaccccggctcctaccatcgcctcccagcctctgtccctgcgtccggaggcatgtagacccgcagctggtggggccgtgcatacccggggtcttgacttcgcctgcgatatctacatttgggcccctctggctggtacttgcggggtcctgctgctttcactcgtgatcactctttactgtaagcgcggtcggaagaagctgctgtacatctttaagcaacccttcatgaggcctgtgcagactactcaagaggaggacggctgttcatgccggttcccagaggaggaggaaggcggctgcgaactgcgcgtgaaattcagccgcagcgcagatgctccagcctacaagcaggggcagaaccagctctacaacgaactcaatcttggtcggagagaggagtacgacgtgctggacaagcggagaggacgggacccagaaatgggcgggaagccgcgcagaaagaatccccaagagggcctgtacaacgagctccaaaaggataagatggcagaagcctatagcgagattggtatgaaaggggaacgcagaagaggcaaaggccacgacggactgtaccagggactcagcaccgccaccaaggacacctatgacgctcttcacatgcaggccctgccgcctcgg

SEQ ID NO: 388 - protein, 247 aa, synthetic construct
  REGION 1..247: note = source = /note="Description of Artificial Sequence: Synthetic polypeptide"
QVQLVQSGAEVKKPGASVKVSCKASGYTFTSYGISWVRQAPGQGLEWMGWISAYNGNTNYAQKLQGRVTMTTDTSTSTAYMELRSLRSDDTAVYYCASFSSSDSYDYWGQGTLVTVSSGGGGSGGGGSGGGGSGGGGSEIVLTQSPATLSVSPGERATLSCRASQSVTSNLAWYQQKPGQAPRLLIYAASTRATGIPARFSGSGSGTEFTLTISSMQSEDFAVYFCQQYHTWPPLTFGGGTKVEIKT

SEQ ID NO: 389 - DNA, 741 bp, synthetic construct
  misc_feature 1..741: note = source = /note="Description of Artificial Sequence: Synthetic polynucleotide"
  source 1..741: mol_type = other DNA
caagtccaactcgtccagtccggtgcagaagtcaagaaaccaggagcttcagtgaaagtgtcgtgcaaggcctccgggtataccttcacttcctacggcattagctgggtgcggcaggcccccggccaagggctggagtggatgggctggatcagcgcctacaacggaaacaccaactacgcccagaagctgcagggacgcgtgaccatgaccactgacacctccacttcgaccgcgtacatggagctcagatcactgcgctccgacgataccgccgtgtactactgcgcctccttctcctcctccgactcctacgactactggggacaggggactctggtcactgtgtcgtccggcggcggcggaagcggtggcggaggcagcggtggaggcggttcgggaggaggagggtccgaaatcgtgctgacccagtcccccgctaccctttccgtgagcccgggggaacgggccaccctgtcttgccgcgcgtcacaaagcgtgacttcgaacctggcctggtaccagcagaagccggggcaggccccgagattgctcatctatgccgcgagcaccagggcaaccggaattcctgcccggttttccggttccgggtcgggcactgagttcaccctgacaatcagctcaatgcagtccgaggatttcgctgtgtacttctgtcaacagtaccacacctggcctcccctgacgttcggaggcggaaccaaggtcgaaatcaagacc

SEQ ID NO: 390 - DNA, 834 bp, synthetic construct
  misc_feature 1..834: note = source = /note="Description of Artificial Sequence: Synthetic polynucleotide"
  source 1..834: mol_type = other DNA
atggccctccctgtcaccgccctgctgcttccgctggctcttctgctccacgccgctcggccccaagtccaactcgtccagtccggtgcagaagtcaagaaaccaggagcttcagtgaaagtgtcgtgcaaggcctccgggtataccttcacttcctacggcattagctgggtgcggcaggcccccggccaagggctggagtggatgggctggatcagcgcctacaacggaaacaccaactacgcccagaagctgcagggacgcgtgaccatgaccactgacacctccacttcgaccgcgtacatggagctcagatcactgcgctccgacgataccgccgtgtactactgcgcctccttctcctcctccgactcctacgactactggggacaggggactctggtcactgtgtcgtccggcggcggcggaagcggtggcggaggcagcggtggaggcggttcgggaggaggagggtccgaaatcgtgctgacccagtcccccgctaccctttccgtgagcccgggggaacgggccaccctgtcttgccgcgcgtcacaaagcgtgacttcgaacctggcctggtaccagcagaagccggggcaggccccgagattgctcatctatgccgcgagcaccagggcaaccggaattcctgcccggttttccggttccgggtcgggcactgagttcaccctgacaatcagctcaatgcagtccgaggatttcgctgtgtacttctgtcaacagtaccacacctggcctcccctgacgttcggaggcggaaccaaggtcgaaatcaagaccggatcgcaccaccatcaccatcatcatcac

SEQ ID NO: 391 - protein, 278 aa, synthetic construct
  REGION 1..278: note = source = /note="Description of Artificial Sequence: Synthetic polypeptide"
MALPVTALLLPLALLLHAARPQVQLVQSGAEVKKPGASVKVSCKASGYTFTSYGISWVRQAPGQGLEWMGWISAYNGNTNYAQKLQGRVTMTTDTSTSTAYMELRSLRSDDTAVYYCASFSSSDSYDYWGQGTLVTVSSGGGGSGGGGSGGGGSGGGGSEIVLTQSPATLSVSPGERATLSCRASQSVTSNLAWYQQKPGQAPRLLIYAASTRATGIPARFSGSGSGTEFTLTISSMQSEDFAVYFCQQYHTWPPLTFGGGTKVEIKTGSHHHHHHHH

SEQ ID NO: 392 - protein, 490 aa, synthetic construct
  REGION 1..490: note = source = /note="Description of Artificial Sequence: Synthetic polypeptide"
MALPVTALLLPLALLLHAARPQVQLVQSGAEVKKPGASVKVSCKASGYTFTSYGISWVRQAPGQGLEWMGWISAYNGNTNYAQKLQGRVTMTTDTSTSTAYMELRSLRSDDTAVYYCASFSSSDSYDYWGQGTLVTVSSGGGGSGGGGSGGGGSGGGGSEIVLTQSPATLSVSPGERATLSCRASQSVTSNLAWYQQKPGQAPRLLIYAASTRATGIPARFSGSGSGTEFTLTISSMQSEDFAVYFCQQYHTWPPLTFGGGTKVEIKTTTPAPRPPTPAPTIASQPLSLRPEACRPAAGGAVHTRGLDFACDIYIWAPLAGTCGVLLLSLVITLYCKRGRKKLLYIFKQPFMRPVQTTQEEDGCSCRFPEEEEGGCELRVKFSRSADAPAYKQGQNQLYNELNLGRREEYDVLDKRRGRDPEMGGKPRRKNPQEGLYNELQKDKMAEAYSEIGMKGERRRGKGHDGLYQGLSTATKDTYDALHMQALPPR

SEQ ID NO: 393 - DNA, 1470 bp, synthetic construct
  misc_feature 1..1470: note = source = /note="Description of Artificial Sequence: Synthetic polynucleotide"
  source 1..1470: mol_type = other DNA
atggccctccctgtcaccgccctgctgcttccgctggctcttctgctccacgccgctcggccccaagtccaactcgtccagtccggtgcagaagtcaagaaaccaggagcttcagtgaaagtgtcgtgcaaggcctccgggtataccttcacttcctacggcattagctgggtgcggcaggcccccggccaagggctggagtggatgggctggatcagcgcctacaacggaaacaccaactacgcccagaagctgcagggacgcgtgaccatgaccactgacacctccacttcgaccgcgtacatggagctcagatcactgcgctccgacgataccgccgtgtactactgcgcctccttctcctcctccgactcctacgactactggggacaggggactctggtcactgtgtcgtccggcggcggcggaagcggtggcggaggcagcggtggaggcggttcgggaggaggagggtccgaaatcgtgctgacccagtcccccgctaccctttccgtgagcccgggggaacgggccaccctgtcttgccgcgcgtcacaaagcgtgacttcgaacctggcctggtaccagcagaagccggggcaggccccgagattgctcatctatgccgcgagcaccagggcaaccggaattcctgcccggttttccggttccgggtcgggcactgagttcaccctgacaatcagctcaatgcagtccgaggatttcgctgtgtacttctgtcaacagtaccacacctggcctcccctgacgttcggaggcggaaccaaggtcgaaatcaagaccactaccccagcaccgaggccacccaccccggctcctaccatcgcctcccagcctctgtccctgcgtccggaggcatgtagacccgcagctggtggggccgtgcatacccggggtcttgacttcgcctgcgatatctacatttgggcccctctggctggtacttgcggggtcctgctgctttcactcgtgatcactctttactgtaagcgcggtcggaagaagctgctgtacatctttaagcaacccttcatgaggcctgtgcagactactcaagaggaggacggctgttcatgccggttcccagaggaggaggaaggcggctgcgaactgcgcgtgaaattcagccgcagcgcagatgctccagcctacaagcaggggcagaaccagctctacaacgaactcaatcttggtcggagagaggagtacgacgtgctggacaagcggagaggacgggacccagaaatgggcgggaagccgcgcagaaagaatccccaagagggcctgtacaacgagctccaaaaggataagatggcagaagcctatagcgagattggtatgaaaggggaacgcagaagaggcaaaggccacgacggactgtaccagggactcagcaccgccaccaaggacacctatgacgctcttcacatgcaggccctgccgcctcgg

SEQ ID NO: 394 - protein, 254 aa, synthetic construct
  REGION 1..254: note = source = /note="Description of Artificial Sequence: Synthetic polypeptide"
QVNLRESGPALVKPTQTLTLTCTFSGFSLNTFGMSVSWIRQPPGKALEWLALIDWDDDKYYSTSLRTRLTISKDTAKNQVVLRMTNMDPMDTATYYCARIYGGDRTNTQAPYFFDLWGQGTLVTVSSGGGGSGGGGSGGGGSDVVMTQSPLSLPVTPGEPASISCRSSQSLLHSNGYNYLDWYLQKPGQSPQLLIYLGSNRASGVPDRFSGSGSGTDFTLKISRVEAEDVGVYYCMQALQTPWTFGQGTKLEIK

SEQ ID NO: 395 - DNA, 762 bp, synthetic construct
  misc_feature 1..762: note = source = /note="Description of Artificial Sequence: Synthetic polynucleotide"
  source 1..762: mol_type = other DNA
caagtcaacctcagagaatcaggtcctgccctcgtcaaacctacccagaccctcaccttgacctgtaccttctccgggttctcgctgaacaccttcgggatgtccgtgagctggattaggcagcccccgggaaaggccctggagtggctggccctgatcgattgggatgacgacaagtactactccacctcactccgcactcgcctgaccatctcaaaggacactgccaagaaccaagtggtgctgcggatgactaacatggacccgatggacaccgccacctattactgcgcccggatctacggaggcgacagaaccaacactcaggccccctacttcttcgatctgtggggacagggcactcttgtgaccgtgtcctcgggcggaggaggctccggtggagggggatcaggaggaggcggcagcgacgtcgtgatgactcaatccccgctgtccttgcctgtgacccctggcgaacccgcgtccattagctgccggagcagccagtccctcctgcactcgaacggatacaactacctggattggtatctgcagaagcccggccagtccccacaactcctgatctacctgggctctaatcgggcatccggggtcccggatcgcttcagcggttcgggctcgggtaccgacttcacgctgaagatttccagggtggaagctgaggacgtgggagtgtactactgcatgcaggcgcttcagactccatggacatttggacaggggaccaagctggagatcaag

SEQ ID NO: 396 - DNA, 855 bp, synthetic construct
  misc_feature 1..855: note = source = /note="Description of Artificial Sequence: Synthetic polynucleotide"
  source 1..855: mol_type = other DNA
atggccctccctgtcaccgccctgctgcttccgctggctcttctgctccacgccgctcggccccaagtcaacctcagagaatcaggtcctgccctcgtcaaacctacccagaccctcaccttgacctgtaccttctccgggttctcgctgaacaccttcgggatgtccgtgagctggattaggcagcccccgggaaaggccctggagtggctggccctgatcgattgggatgacgacaagtactactccacctcactccgcactcgcctgaccatctcaaaggacactgccaagaaccaagtggtgctgcggatgactaacatggacccgatggacaccgccacctattactgcgcccggatctacggaggcgacagaaccaacactcaggccccctacttcttcgatctgtggggacagggcactcttgtgaccgtgtcctcgggcggaggaggctccggtggagggggatcaggaggaggcggcagcgacgtcgtgatgactcaatccccgctgtccttgcctgtgacccctggcgaacccgcgtccattagctgccggagcagccagtccctcctgcactcgaacggatacaactacctggattggtatctgcagaagcccggccagtccccacaactcctgatctacctgggctctaatcgggcatccggggtcccggatcgcttcagcggttcgggctcgggtaccgacttcacgctgaagatttccagggtggaagctgaggacgtgggagtgtactactgcatgcaggcgcttcagactccatggacatttggacaggggaccaagctggagatcaagggatcgcaccaccatcaccatcatcatcac

SEQ ID NO: 397 - protein, 285 aa, synthetic construct
  REGION 1..285: note = source = /note="Description of Artificial Sequence: Synthetic polypeptide"
MALPVTALLLPLALLLHAARPQVNLRESGPALVKPTQTLTLTCTFSGFSLNTFGMSVSWIRQPPGKALEWLALIDWDDDKYYSTSLRTRLTISKDTAKNQVVLRMTNMDPMDTATYYCARIYGGDRTNTQAPYFFDLWGQGTLVTVSSGGGGSGGGGSGGGGSDVVMTQSPLSLPVTPGEPASISCRSSQSLLHSNGYNYLDWYLQKPGQSPQLLIYLGSNRASGVPDRFSGSGSGTDFTLKISRVEAEDVGVYYCMQALQTPWTFGQGTKLEIKGSHHHHHHHH

SEQ ID NO: 398 - protein, 498 aa, synthetic construct
  REGION 1..498: note = source = /note="Description of Artificial Sequence: Synthetic polypeptide"
MALPVTALLLPLALLLHAARPQVNLRESGPALVKPTQTLTLTCTFSGFSLNTFGMSVSWIRQPPGKALEWLALIDWDDDKYYSTSLRTRLTISKDTAKNQVVLRMTNMDPMDTATYYCARIYGGDRTNTQAPYFFDLWGQGTLVTVSSGGGGSGGGGSGGGGSDVVMTQSPLSLPVTPGEPASISCRSSQSLLHSNGYNYLDWYLQKPGQSPQLLIYLGSNRASGVPDRFSGSGSGTDFTLKISRVEAEDVGVYYCMQALQTPWTFGQGTKLEIKTTTPAPRPPTPAPTIASQPLSLRPEACRPAAGGAVHTRGLDFACDIYIWAPLAGTCGVLLLSLVITLYCKRGRKKLLYIFKQPFMRPVQTTQEEDGCSCRFPEEEEGGCELRVKFSRSADAPAYKQGQNQLYNELNLGRREEYDVLDKRRGRDPEMGGKPRRKNPQEGLYNELQKDKMAEAYSEIGMKGERRRGKGHDGLYQGLSTATKDTYDALHMQALPPR

SEQ ID NO: 399 - DNA, 1494 bp, synthetic construct
  misc_feature 1..1494: note = source = /note="Description of Artificial Sequence: Synthetic polynucleotide"
  source 1..1494: mol_type = other DNA
atggccctccctgtcaccgccctgctgcttccgctggctcttctgctccacgccgctcggccccaagtcaacctcagagaatcaggtcctgccctcgtcaaacctacccagaccctcaccttgacctgtaccttctccgggttctcgctgaacaccttcgggatgtccgtgagctggattaggcagcccccgggaaaggccctggagtggctggccctgatcgattgggatgacgacaagtactactccacctcactccgcactcgcctgaccatctcaaaggacactgccaagaaccaagtggtgctgcggatgactaacatggacccgatggacaccgccacctattactgcgcccggatctacggaggcgacagaaccaacactcaggccccctacttcttcgatctgtggggacagggcactcttgtgaccgtgtcctcgggcggaggaggctccggtggagggggatcaggaggaggcggcagcgacgtcgtgatgactcaatccccgctgtccttgcctgtgacccctggcgaacccgcgtccattagctgccggagcagccagtccctcctgcactcgaacggatacaactacctggattggtatctgcagaagcccggccagtccccacaactcctgatctacctgggctctaatcgggcatccggggtcccggatcgcttcagcggttcgggctcgggtaccgacttcacgctgaagatttccagggtggaagctgaggacgtgggagtgtactactgcatgcaggcgcttcagactccatggacatttggacaggggaccaagctggagatcaagaccactaccccagcaccgaggccacccaccccggctcctaccatcgcctcccagcctctgtccctgcgtccggaggcatgtagacccgcagctggtggggccgtgcatacccggggtcttgacttcgcctgcgatatctacatttgggcccctctggctggtacttgcggggtcctgctgctttcactcgtgatcactctttactgtaagcgcggtcggaagaagctgctgtacatctttaagcaacccttcatgaggcctgtgcagactactcaagaggaggacggctgttcatgccggttcccagaggaggaggaaggcggctgcgaactgcgcgtgaaattcagccgcagcgcagatgctccagcctacaagcaggggcagaaccagctctacaacgaactcaatcttggtcggagagaggagtacgacgtgctggacaagcggagaggacgggacccagaaatgggcgggaagccgcgcagaaagaatccccaagagggcctgtacaacgagctccaaaaggataagatggcagaagcctatagcgagattggtatgaaaggggaacgcagaagaggcaaaggccacgacggactgtaccagggactcagcaccgccaccaaggacacctatgacgctcttcacatgcaggccctgccgcctcgg

SEQ ID NO: 400 - protein, 248 aa, synthetic construct
  REGION 1..248: note = source = /note="Description of Artificial Sequence: Synthetic polypeptide"
QVQLQESGPGLVKPSGTLSLTCAVSGASITSRHWWNWVRHSPGKGLEWIGQIYHSGTTTYNPSLGSRVTISVDKSKNQISLELRSVTAADTATYYCVRDYLELATYYGMDVWGQGTTVTVSSGGGGSGGGGSGGGGSEIVLTQSPLSLPVTPGEPASISCRSSQSLLYSDGYNYLDWYLQKPGQSPQLLIYLGSNRASGVPDRFSGSGSGTDFTLQISGVETEDVGVYYCMQALQTQSFGQGTKLEIK

SEQ ID NO: 401 - DNA, 744 bp, synthetic construct
  misc_feature 1..744: note = source = /note="Description of Artificial Sequence: Synthetic polynucleotide"
  source 1..744: mol_type = other DNA
caagtgcagcttcaagaatcaggacctggcctcgtcaaaccctccggtaccctctccctcacctgtgccgtgtccggggcatctatcacctcccgccactggtggaactgggtcagacactccccgggaaagggattggagtggattggccagatctaccattccggcaccactacttacaacccgtccctgggctcccgcgtcactatctccgtggacaagtccaagaatcagattagcctggagctgcggtccgtgaccgctgccgataccgcgacctattactgcgtgcgggactacctggagctcgccacgtactacggaatggacgtctggggccagggcactaccgtgaccgtgtcaagcggggggggcggatcgggtggtggaggatcgggaggaggagggtcggaaatcgtgctgactcagtcccccctgtcgctgcctgtgactcctggggaaccagcctcaattagctgccgctcgagccagtccctgctgtattccgacggatacaactacctggattggtaccttcaaaagcccggccagagcccgcagctgctgatctacctgggttcaaacagggcctccggcgtgccggatcggttctcgggaagcggtagcgggacagacttcaccctgcaaatcagcggagtggaaactgaggacgtgggcgtgtactactgcatgcaggcgttgcagacccagtcctttggacaaggcaccaagctcgaaatcaag

SEQ ID NO: 402 - DNA, 837 bp, synthetic construct
  misc_feature 1..837: note = source = /note="Description of Artificial Sequence: Synthetic polynucleotide"
  source 1..837: mol_type = other DNA
atggccctccctgtcaccgccctgctgcttccgctggctcttctgctccacgccgctcggccccaagtgcagcttcaagaatcaggacctggcctcgtcaaaccctccggtaccctctccctcacctgtgccgtgtccggggcatctatcacctcccgccactggtggaactgggtcagacactccccgggaaagggattggagtggattggccagatctaccattccggcaccactacttacaacccgtccctgggctcccgcgtcactatctccgtggacaagtccaagaatcagattagcctggagctgcggtccgtgaccgctgccgataccgcgacctattactgcgtgcgggactacctggagctcgccacgtactacggaatggacgtctggggccagggcactaccgtgaccgtgtcaagcggggggggcggatcgggtggtggaggatcgggaggaggagggtcggaaatcgtgctgactcagtcccccctgtcgctgcctgtgactcctggggaaccagcctcaattagctgccgctcgagccagtccctgctgtattccgacggatacaactacctggattggtaccttcaaaagcccggccagagcccgcagctgctgatctacctgggttcaaacagggcctccggcgtgccggatcggttctcgggaagcggtagcgggacagacttcaccctgcaaatcagcggagtggaaactgaggacgtgggcgtgtactactgcatgcaggcgttgcagacccagtcctttggacaaggcaccaagctcgaaatcaagggatcgcaccaccatcaccatcatcatcac

SEQ ID NO: 403 - protein, 279 aa, synthetic construct
  REGION 1..279: note = source = /note="Description of Artificial Sequence: Synthetic polypeptide"
MALPVTALLLPLALLLHAARPQVQLQESGPGLVKPSGTLSLTCAVSGASITSRHWWNWVRHSPGKGLEWIGQIYHSGTTTYNPSLGSRVTISVDKSKNQISLELRSVTAADTATYYCVRDYLELATYYGMDVWGQGTTVTVSSGGGGSGGGGSGGGGSEIVLTQSPLSLPVTPGEPASISCRSSQSLLYSDGYNYLDWYLQKPGQSPQLLIYLGSNRASGVPDRFSGSGSGTDFTLQISGVETEDVGVYYCMQALQTQSFGQGTKLEIKGSHHHHHHHH

SEQ ID NO: 404 - protein, 492 aa, synthetic construct
  REGION 1..492: note = source = /note="Description of Artificial Sequence: Synthetic polypeptide"
MALPVTALLLPLALLLHAARPQVQLQESGPGLVKPSGTLSLTCAVSGASITSRHWWNWVRHSPGKGLEWIGQIYHSGTTTYNPSLGSRVTISVDKSKNQISLELRSVTAADTATYYCVRDYLELATYYGMDVWGQGTTVTVSSGGGGSGGGGSGGGGSEIVLTQSPLSLPVTPGEPASISCRSSQSLLYSDGYNYLDWYLQKPGQSPQLLIYLGSNRASGVPDRFSGSGSGTDFTLQISGVETEDVGVYYCMQALQTQSFGQGTKLEIKTTTPAPRPPTPAPTIASQPLSLRPEACRPAAGGAVHTRGLDFACDIYIWAPLAGTCGVLLLSLVITLYCKRGRKKLLYIFKQPFMRPVQTTQEEDGCSCRFPEEEEGGCELRVKFSRSADAPAYKQGQNQLYNELNLGRREEYDVLDKRRGRDPEMGGKPRRKNPQEGLYNELQKDKMAEAYSEIGMKGERRRGKGHDGLYQGLSTATKDTYDALHMQALPPR

SEQ ID NO: 405 - DNA, 1476 bp, synthetic construct
  misc_feature 1..1476: note = source = /note="Description of Artificial Sequence: Synthetic polynucleotide"
  source 1..1476: mol_type = other DNA
atggccctccctgtcaccgccctgctgcttccgctggctcttctgctccacgccgctcggccccaagtgcagcttcaagaatcaggacctggcctcgtcaaaccctccggtaccctctccctcacctgtgccgtgtccggggcatctatcacctcccgccactggtggaactgggtcagacactccccgggaaagggattggagtggattggccagatctaccattccggcaccactacttacaacccgtccctgggctcccgcgtcactatctccgtggacaagtccaagaatcagattagcctggagctgcggtccgtgaccgctgccgataccgcgacctattactgcgtgcgggactacctggagctcgccacgtactacggaatggacgtctggggccagggcactaccgtgaccgtgtcaagcggggggggcggatcgggtggtggaggatcgggaggaggagggtcggaaatcgtgctgactcagtcccccctgtcgctgcctgtgactcctggggaaccagcctcaattagctgccgctcgagccagtccctgctgtattccgacggatacaactacctggattggtaccttcaaaagcccggccagagcccgcagctgctgatctacctgggttcaaacagggcctccggcgtgccggatcggttctcgggaagcggtagcgggacagacttcaccctgcaaatcagcggagtggaaactgaggacgtgggcgtgtactactgcatgcaggcgttgcagacccagtcctttggacaaggcaccaagctcgaaatcaagaccactaccccagcaccgaggccacccaccccggctcctaccatcgcctcccagcctctgtccctgcgtccggaggcatgtagacccgcagctggtggggccgtgcatacccggggtcttgacttcgcctgcgatatctacatttgggcccctctggctggtacttgcggggtcctgctgctttcactcgtgatcactctttactgtaagcgcggtcggaagaagctgctgtacatctttaagcaacccttcatgaggcctgtgcagactactcaagaggaggacggctgttcatgccggttcccagaggaggaggaaggcggctgcgaactgcgcgtgaaattcagccgcagcgcagatgctccagcctacaagcaggggcagaaccagctctacaacgaactcaatcttggtcggagagaggagtacgacgtgctggacaagcggagaggacgggacccagaaatgggcgggaagccgcgcagaaagaatccccaagagggcctgtacaacgagctccaaaaggataagatggcagaagcctatagcgagattggtatgaaaggggaacgcagaagaggcaaaggccacgacggactgtaccagggactcagcaccgccaccaaggacacctatgacgctcttcacatgcaggccctgccgcctcgg

SEQ ID NO: 406 - protein, 247 aa, synthetic construct
  REGION 1..247: note = source = /note="Description of Artificial Sequence: Synthetic polypeptide"
QVQLVQSGAEVKKPGASVKVSCKASGYTFTSYYMHWVRQAPGQGLEWMGIINPSGGSTSYAQKFQGRVTMTRDTSTSTVYMELSSLRSEDTAVYYCARDLAAAGNYYYYGMDVWGQGTTVTVSSGGGGSGGGGSGGGGSSSELTQDPAVSVALGQTARITCQGDSLRSYFTSWYHQKPGQAPVLVIYGNNNRPSGIPDRFSGSSSGNTASLTITGAQAEDEGDYYCDSRDSSGDHLVFGGGTKLTVL

SEQ ID NO: 407 - DNA, 741 bp, synthetic construct
  misc_feature 1..741: note = source = /note="Description of Artificial Sequence: Synthetic polynucleotide"
  source 1..741: mol_type = other DNA
caagtccaactcgtccagtccggtgcagaagtcaagaaaccaggagcttcagtgaaagtgtcgtgcaaggcctccggctataccttcacctcctactacatgcactgggtgcgccaggccccgggccagggactggagtggatgggaattatcaacccttcgggcggctccactagctacgcccaaaagtttcaggggagagtgaccatgactcgggacacctcaacctcgaccgtgtacatggaactgtcgtcactgcggtccgaggacaccgccgtgtactactgcgcgcgcgacttggccgccgcggggaattactactactacggaatggatgtctggggacagggaaccactgtgactgtgtcgtctggtggtggtggaagcgggggaggaggttcgggcggcggcggaagctcctccgaactgacccaggaccctgcggtgtccgtggccctgggacagaccgcaaggatcacgtgtcagggagacagcctccgctcctacttcacatcctggtatcatcagaagcccggccaggctccggtgctggtcatctacggaaacaacaacagaccgtccgggattcccgaccggttcagcggctcctcatccggcaacaccgcctccctgaccatcaccggcgcccaggccgaggacgagggagattactactgcgactcccgggatagcagcggcgatcacctcgtgttcgggggagggactaagcttactgtgctg

SEQ ID NO: 408 - DNA, 834 bp, synthetic construct
  misc_feature 1..834: note = source = /note="Description of Artificial Sequence: Synthetic polynucleotide"
  source 1..834: mol_type = other DNA
atggccctccctgtcaccgccctgctgcttccgctggctcttctgctccacgccgctcggccccaagtccaactcgtccagtccggtgcagaagtcaagaaaccaggagcttcagtgaaagtgtcgtgcaaggcctccggctataccttcacctcctactacatgcactgggtgcgccaggccccgggccagggactggagtggatgggaattatcaacccttcgggcggctccactagctacgcccaaaagtttcaggggagagtgaccatgactcgggacacctcaacctcgaccgtgtacatggaactgtcgtcactgcggtccgaggacaccgccgtgtactactgcgcgcgcgacttggccgccgcggggaattactactactacggaatggatgtctggggacagggaaccactgtgactgtgtcgtctggtggtggtggaagcgggggaggaggttcgggcggcggcggaagctcctccgaactgacccaggaccctgcggtgtccgtggccctgggacagaccgcaaggatcacgtgtcagggagacagcctccgctcctacttcacatcctggtatcatcagaagcccggccaggctccggtgctggtcatctacggaaacaacaacagaccgtccgggattcccgaccggttcagcggctcctcatccggcaacaccgcctccctgaccatcaccggcgcccaggccgaggacgagggagattactactgcgactcccgggatagcagcggcgatcacctcgtgttcgggggagggactaagcttactgtgctgggatcgcaccaccatcaccatcatcatcac

SEQ ID NO: 409 - protein, 278 aa, synthetic construct
  REGION 1..278: note = source = /note="Description of Artificial Sequence: Synthetic polypeptide"
MALPVTALLLPLALLLHAARPQVQLVQSGAEVKKPGASVKVSCKASGYTFTSYYMHWVRQAPGQGLEWMGIINPSGGSTSYAQKFQGRVTMTRDTSTSTVYMELSSLRSEDTAVYYCARDLAAAGNYYYYGMDVWGQGTTVTVSSGGGGSGGGGSGGGGSSSELTQDPAVSVALGQTARITCQGDSLRSYFTSWYHQKPGQAPVLVIYGNNNRPSGIPDRFSGSSSGNTASLTITGAQAEDEGDYYCDSRDSSGDHLVFGGGTKLTVLGSHHHHHHHH

SEQ ID NO: 410 - protein, 491 aa, synthetic construct
  REGION 1..491: note = source = /note="Description of Artificial Sequence: Synthetic polypeptide"
MALPVTALLLPLALLLHAARPQVQLVQSGAEVKKPGASVKVSCKASGYTFTSYYMHWVRQAPGQGLEWMGIINPSGGSTSYAQKFQGRVTMTRDTSTSTVYMELSSLRSEDTAVYYCARDLAAAGNYYYYGMDVWGQGTTVTVSSGGGGSGGGGSGGGGSSSELTQDPAVSVALGQTARITCQGDSLRSYFTSWYHQKPGQAPVLVIYGNNNRPSGIPDRFSGSSSGNTASLTITGAQAEDEGDYYCDSRDSSGDHLVFGGGTKLTVLTTTPAPRPPTPAPTIASQPLSLRPEACRPAAGGAVHTRGLDFACDIYIWAPLAGTCGVLLLSLVITLYCKRGRKKLLYIFKQPFMRPVQTTQEEDGCSCRFPEEEEGGCELRVKFSRSADAPAYKQGQNQLYNELNLGRREEYDVLDKRRGRDPEMGGKPRRKNPQEGLYNELQKDKMAEAYSEIGMKGERRRGKGHDGLYQGLSTATKDTYDALHMQALPPR

SEQ ID NO: 411 - DNA, 1473 bp, synthetic construct
  misc_feature 1..1473: note = source = /note="Description of Artificial Sequence: Synthetic polynucleotide"
  source 1..1473: mol_type = other DNA
atggccctccctgtcaccgccctgctgcttccgctggctcttctgctccacgccgctcggccccaagtccaactcgtccagtccggtgcagaagtcaagaaaccaggagcttcagtgaaagtgtcgtgcaaggcctccggctataccttcacctcctactacatgcactgggtgcgccaggccccgggccagggactggagtggatgggaattatcaacccttcgggcggctccactagctacgcccaaaagtttcaggggagagtgaccatgactcgggacacctcaacctcgaccgtgtacatggaactgtcgtcactgcggtccgaggacaccgccgtgtactactgcgcgcgcgacttggccgccgcggggaattactactactacggaatggatgtctggggacagggaaccactgtgactgtgtcgtctggtggtggtggaagcgggggaggaggttcgggcggcggcggaagctcctccgaactgacccaggaccctgcggtgtccgtggccctgggacagaccgcaaggatcacgtgtcagggagacagcctccgctcctacttcacatcctggtatcatcagaagcccggccaggctccggtgctggtcatctacggaaacaacaacagaccgtccgggattcccgaccggttcagcggctcctcatccggcaacaccgcctccctgaccatcaccggcgcccaggccgaggacgagggagattactactgcgactcccgggatagcagcggcgatcacctcgtgttcgggggagggactaagcttactgtgctgaccactaccccagcaccgaggccacccaccccggctcctaccatcgcctcccagcctctgtccctgcgtccggaggcatgtagacccgcagctggtggggccgtgcatacccggggtcttgacttcgcctgcgatatctacatttgggcccctctggctggtacttgcggggtcctgctgctttcactcgtgatcactctttactgtaagcgcggtcggaagaagctgctgtacatctttaagcaacccttcatgaggcctgtgcagactactcaagaggaggacggctgttcatgccggttcccagaggaggaggaaggcggctgcgaactgcgcgtgaaattcagccgcagcgcagatgctccagcctacaagcaggggcagaaccagctctacaacgaactcaatcttggtcggagagaggagtacgacgtgctggacaagcggagaggacgggacccagaaatgggcgggaagccgcgcagaaagaatccccaagagggcctgtacaacgagctccaaaaggataagatggcagaagcctatagcgagattggtatgaaaggggaacgcagaagaggcaaaggccacgacggactgtaccagggactcagcaccgccaccaaggacacctatgacgctcttcacatgcaggccctgccgcctcgg

SEQ ID NO: 412 - protein, 246 aa, synthetic construct
  REGION 1..246: note = source = /note="Description of Artificial Sequence: Synthetic polypeptide"
QVQLVQSGAEVKKPGASVKVSCKASGYTFTSYYMHWVRQAPGQGLEWMGIINPSGGSTSYAQKFQGRVTMTRDTSTSTVYMELSSLRSEDTAVYYCARDDDFWSGSGAFDIWGQGTTVTVSSGGGGSGGGGSGGGGSSSELTQDPAVSVALGQTVRITCQGDSLRSYYASWYQQKPGQAPVLVIYGKNNRPSGIPDRFSGSSSGNTASLTITGAQAEDEADYYCNSRDSSGNHPVVFGGGTKLTVL

SEQ ID NO: 413 - DNA, 738 bp, synthetic construct
  misc_feature 1..738: note = source = /note="Description of Artificial Sequence: Synthetic polynucleotide"
  source 1..738: mol_type = other DNA
caagtccaactcgtccaatccggtgcagaagtcaagaaacctggagcttccgtgaaagtgtcctgcaaggcgtcaggctacacctttacgtcctactacatgcactgggtccgccaggccccgggccagggcttggagtggatgggaatcattaaccccagcggcggcagcactagctatgcccagaagttccagggtcgggtcaccatgactagagacacatccacctccaccgtgtacatggaactgagctccctgcggtccgaggataccgcggtgtactactgcgcccgcgatgacgacttctggtccggctcgggggcattcgacatctggggacagggcaccaccgtgactgtgtcctccggcggtggaggatcgggtggcggaggaagcggtggaggcggatcttcgtccgaactgactcaggaccctgccgtgtcggtggccctgggacagactgtgcgcatcacctgtcaaggagatagcctgaggtcgtactatgcctcctggtaccagcagaagcccggacaggccccggtgcttgtgatctacgggaagaacaacagaccgtcagggattccagaccggttcagcgggtcatccagcgggaataccgcttccctcactatcaccggagcccaggcggaggacgaggccgattactactgcaactcgcgggactcatccggcaaccatcccgtggtgttcggagggggcactaagctgaccgtgctg

SEQ ID NO: 414 - DNA, 831 bp, synthetic construct
  misc_feature 1..831: note = source = /note="Description of Artificial Sequence: Synthetic polynucleotide"
  source 1..831: mol_type = other DNA
atggccctccctgtcaccgccctgctgcttccgctggctcttctgctccacgccgctcggccccaagtccaactcgtccaatccggtgcagaagtcaagaaacctggagcttccgtgaaagtgtcctgcaaggcgtcaggctacacctttacgtcctactacatgcactgggtccgccaggccccgggccagggcttggagtggatgggaatcattaaccccagcggcggcagcactagctatgcccagaagttccagggtcgggtcaccatgactagagacacatccacctccaccgtgtacatggaactgagctccctgcggtccgaggataccgcggtgtactactgcgcccgcgatgacgacttctggtccggctcgggggcattcgacatctggggacagggcaccaccgtgactgtgtcctccggcggtggaggatcgggtggcggaggaagcggtggaggcggatcttcgtccgaactgactcaggaccctgccgtgtcggtggccctgggacagactgtgcgcatcacctgtcaaggagatagcctgaggtcgtactatgcctcctggtaccagcagaagcccggacaggccccggtgcttgtgatctacgggaagaacaacagaccgtcagggattccagaccggttcagcgggtcatccagcgggaataccgcttccctcactatcaccggagcccaggcggaggacgaggccgattactactgcaactcgcgggactcatccggcaaccatcccgtggtgttcggagggggcactaagctgaccgtgctgggatcgcaccaccatcaccatcatcatcac

SEQ ID NO: 415 - protein, 277 aa, synthetic construct
  REGION 1..277: note = source = /note="Description of Artificial Sequence: Synthetic polypeptide"
MALPVTALLLPLALLLHAARPQVQLVQSGAEVKKPGASVKVSCKASGYTFTSYYMHWVRQAPGQGLEWMGIINPSGGSTSYAQKFQGRVTMTRDTSTSTVYMELSSLRSEDTAVYYCARDDDFWSGSGAFDIWGQGTTVTVSSGGGGSGGGGSGGGGSSSELTQDPAVSVALGQTVRITCQGDSLRSYYASWYQQKPGQAPVLVIYGKNNRPSGIPDRFSGSSSGNTASLTITGAQAEDEADYYCNSRDSSGNHPVVFGGGTKLTVLGSHHHHHHHH

SEQ ID NO: 416 - protein, 490 aa, synthetic construct
  REGION 1..490: note = source = /note="Description of Artificial Sequence: Synthetic polypeptide"
MALPVTALLLPLALLLHAARPQVQLVQSGAEVKKPGASVKVSCKASGYTFTSYYMHWVRQAPGQGLEWMGIINPSGGSTSYAQKFQGRVTMTRDTSTSTVYMELSSLRSEDTAVYYCARDDDFWSGSGAFDIWGQGTTVTVSSGGGGSGGGGSGGGGSSSELTQDPAVSVALGQTVRITCQGDSLRSYYASWYQQKPGQAPVLVIYGKNNRPSGIPDRFSGSSSGNTASLTITGAQAEDEADYYCNSRDSSGNHPVVFGGGTKLTVLTTTPAPRPPTPAPTIASQPLSLRPEACRPAAGGAVHTRGLDFACDIYIWAPLAGTCGVLLLSLVITLYCKRGRKKLLYIFKQPFMRPVQTTQEEDGCSCRFPEEEEGGCELRVKFSRSADAPAYKQGQNQLYNELNLGRREEYDVLDKRRGRDPEMGGKPRRKNPQEGLYNELQKDKMAEAYSEIGMKGERRRGKGHDGLYQGLSTATKDTYDALHMQALPPR

SEQ ID NO: 417 - DNA, 1470 bp, synthetic construct
  misc_feature 1..1470: note = source = /note="Description of Artificial Sequence: Synthetic polynucleotide"
  source 1..1470: mol_type = other DNA
atggccctccctgtcaccgccctgctgcttccgctggctcttctgctccacgccgctcggccccaagtccaactcgtccaatccggtgcagaagtcaagaaacctggagcttccgtgaaagtgtcctgcaaggcgtcaggctacacctttacgtcctactacatgcactgggtccgccaggccccgggccagggcttggagtggatgggaatcattaaccccagcggcggcagcactagctatgcccagaagttccagggtcgggtcaccatgactagagacacatccacctccaccgtgtacatggaactgagctccctgcggtccgaggataccgcggtgtactactgcgcccgcgatgacgacttctggtccggctcgggggcattcgacatctggggacagggcaccaccgtgactgtgtcctccggcggtggaggatcgggtggcggaggaagcggtggaggcggatcttcgtccgaactgactcaggaccctgccgtgtcggtggccctgggacagactgtgcgcatcacctgtcaaggagatagcctgaggtcgtactatgcctcctggtaccagcagaagcccggacaggccccggtgcttgtgatctacgggaagaacaacagaccgtcagggattccagaccggttcagcgggtcatccagcgggaataccgcttccctcactatcaccggagcccaggcggaggacgaggccgattactactgcaactcgcgggactcatccggcaaccatcccgtggtgttcggagggggcactaagctgaccgtgctgaccactaccccagcaccgaggccacccaccccggctcctaccatcgcctcccagcctctgtccctgcgtccggaggcatgtagacccgcagctggtggggccgtgcatacccggggtcttgacttcgcctgcgatatctacatttgggcccctctggctggtacttgcggggtcctgctgctttcactcgtgatcactctttactgtaagcgcggtcggaagaagctgctgtacatctttaagcaacccttcatgaggcctgtgcagactactcaagaggaggacggctgttcatgccggttcccagaggaggaggaaggcggctgcgaactgcgcgtgaaattcagccgcagcgcagatgctccagcctacaagcaggggcagaaccagctctacaacgaactcaatcttggtcggagagaggagtacgacgtgctggacaagcggagaggacgggacccagaaatgggcgggaagccgcgcagaaagaatccccaagagggcctgtacaacgagctccaaaaggataagatggcagaagcctatagcgagattggtatgaaaggggaacgcagaagaggcaaaggccacgacggactgtaccagggactcagcaccgccaccaaggacacctatgacgctcttcacatgcaggccctgccgcctcgg

SEQ ID NO: 418 - protein, 248 aa, synthetic construct
  REGION 1..248: note = source = /note="Description of Artificial Sequence: Synthetic polypeptide"
QVQLVQSGAEVKKPGASVKVSCKASGYTFTSYYMHWVRQAPGQGLEWMGIINPSGGSTSYAQKFQGRVTMTRDTSTSTVYMELSSLRSEDTAVYYCARPEGVSYYDSSVLDYWGQGTLVTVSSGGGGSGGGGSGGGGSQSALTQPASVSGSPGQSITISCTGTSSDVGGYKHVSWYQHHPGKAPKLMIYDVSNRPSGVSNRFSGSKSGNTASLTVSGLQAEDEAHYYCVSYRNFNSLVFGTGTKVTVL

SEQ ID NO: 419 - DNA, 837 bp, synthetic construct
  misc_feature 1..837: note = source = /note="Description of Artificial Sequence: Synthetic polynucleotide"
  source 1..837: mol_type = other DNA
atggccctccctgtcaccgccctgctgcttccgctggctcttctgctccacgccgctcggccccaagtccaactcgtccagtccggtgcagaagtcaagaaacccggagcttccgtgaaagtgtcctgcaaggcctcggggtataccttcacttcctactacatgcactgggtccggcaggcgccgggacagggactggaatggatgggtatcatcaacccctcgggcggttccactagctacgcccagaagttccagggaagagtgaccatgacccgggacacttccacttcgaccgtgtacatggaactgagcagcctgaggagcgaggacaccgccgtgtactactgtgcccggcccgagggagtgtcctactacgattcctccgtgctggattactggggacagggaacacttgtgaccgtgtcctcgggaggaggcggaagcgggggcggagggtctgggggaggcggctcccagtccgctctgacgcagcctgcgtccgtgtccgggagccctggccagagcattactatttcatgcaccggtaccagctccgacgtgggcggatataagcacgtgtcatggtaccagcatcacccgggaaaggccccaaagctgatgatctacgacgtgtcgaacagaccgagcggggtgtcaaatcgcttttccggttcaaagtcgggcaacactgcctcactcaccgtgtcgggcctccaagcggaggacgaagcccactactactgcgtgtcctaccgcaacttcaactccttggtgttcggcaccggcaccaaggtcaccgtcctgggatcgcaccaccatcaccatcatcatcac

SEQ ID NO: 420 - protein, 279 aa, synthetic construct
  REGION 1..279: note = source = /note="Description of Artificial Sequence: Synthetic polypeptide"
MALPVTALLLPLALLLHAARPQVQLVQSGAEVKKPGASVKVSCKASGYTFTSYYMHWVRQAPGQGLEWMGIINPSGGSTSYAQKFQGRVTMTRDTSTSTVYMELSSLRSEDTAVYYCARPEGVSYYDSSVLDYWGQGTLVTVSSGGGGSGGGGSGGGGSQSALTQPASVSGSPGQSITISCTGTSSDVGGYKHVSWYQHHPGKAPKLMIYDVSNRPSGVSNRFSGSKSGNTASLTVSGLQAEDEAHYYCVSYRNFNSLVFGTGTKVTVLGSHHHHHHHH

SEQ ID NO: 421 - protein, 492 aa, synthetic construct
  REGION 1..492: note = source = /note="Description of Artificial Sequence: Synthetic polypeptide"
MALPVTALLLPLALLLHAARPQVQLVQSGAEVKKPGASVKVSCKASGYTFTSYYMHWVRQAPGQGLEWMGIINPSGGSTSYAQKFQGRVTMTRDTSTSTVYMELSSLRSEDTAVYYCARPEGVSYYDSSVLDYWGQGTLVTVSSGGGGSGGGGSGGGGSQSALTQPASVSGSPGQSITISCTGTSSDVGGYKHVSWYQHHPGKAPKLMIYDVSNRPSGVSNRFSGSKSGNTASLTVSGLQAEDEAHYYCVSYRNFNSLVFGTGTKVTVLTTTPAPRPPTPAPTIASQPLSLRPEACRPAAGGAVHTRGLDFACDIYIWAPLAGTCGVLLLSLVITLYCKRGRKKLLYIFKQPFMRPVQTTQEEDGCSCRFPEEEEGGCELRVKFSRSADAPAYKQGQNQLYNELNLGRREEYDVLDKRRGRDPEMGGKPRRKNPQEGLYNELQKDKMAEAYSEIGMKGERRRGKGHDGLYQGLSTATKDTYDALHMQALPPR

SEQ ID NO: 422 - DNA, 1476 bp, synthetic construct
  misc_feature 1..1476: note = source = /note="Description of Artificial Sequence: Synthetic polynucleotide"
  source 1..1476: mol_type = other DNA
atggccctccctgtcaccgccctgctgcttccgctggctcttctgctccacgccgctcggccccaagtccaactcgtccagtccggtgcagaagtcaagaaacccggagcttccgtgaaagtgtcctgcaaggcctcggggtataccttcacttcctactacatgcactgggtccggcaggcgccgggacagggactggaatggatgggtatcatcaacccctcgggcggttccactagctacgcccagaagttccagggaagagtgaccatgacccgggacacttccacttcgaccgtgtacatggaactgagcagcctgaggagcgaggacaccgccgtgtactactgtgcccggcccgagggagtgtcctactacgattcctccgtgctggattactggggacagggaacacttgtgaccgtgtcctcgggaggaggcggaagcgggggcggagggtctgggggaggcggctcccagtccgctctgacgcagcctgcgtccgtgtccgggagccctggccagagcattactatttcatgcaccggtaccagctccgacgtgggcggatataagcacgtgtcatggtaccagcatcacccgggaaaggccccaaagctgatgatctacgacgtgtcgaacagaccgagcggggtgtcaaatcgcttttccggttcaaagtcgggcaacactgcctcactcaccgtgtcgggcctccaagcggaggacgaagcccactactactgcgtgtcctaccgcaacttcaactccttggtgttcggcaccggcaccaaggtcaccgtcctgaccactaccccagcaccgaggccacccaccccggctcctaccatcgcctcccagcctctgtccctgcgtccggaggcatgtagacccgcagctggtggggccgtgcatacccggggtcttgacttcgcctgcgatatctacatttgggcccctctggctggtacttgcggggtcctgctgctttcactcgtgatcactctttactgtaagcgcggtcggaagaagctgctgtacatctttaagcaacccttcatgaggcctgtgcagactactcaagaggaggacggctgttcatgccggttcccagaggaggaggaaggcggctgcgaactgcgcgtgaaattcagccgcagcgcagatgctccagcctacaagcaggggcagaaccagctctacaacgaactcaatcttggtcggagagaggagtacgacgtgctggacaagcggagaggacgggacccagaaatgggcgggaagccgcgcagaaagaatccccaagagggcctgtacaacgagctccaaaaggataagatggcagaagcctatagcgagattggtatgaaaggggaacgcagaagaggcaaaggccacgacggactgtaccagggactcagcaccgccaccaaggacacctatgacgctcttcacatgcaggccctgccgcctcgg

SEQ ID NO: 423 - protein, 246 aa, synthetic construct
  REGION 1..246: note = source = /note="Description of Artificial Sequence: Synthetic polypeptide"
QVQLVQSGAEVKKPGASVKVSCKASGYTFTSYYMHWVRQAPGQGLEWMGIINPSGGSTSYAQKFQGRVTMTRDTSTSTVYMELSSLRAEDTAVYYCARGGYGDYLDAFDIWGQGTTVTVSSGGGGSGGGGSGSGGSQSALTQPASVSGSPGQSITISCTGTSSDVGGYNYVSWYQQHPGKAPKLMIYEVSNRPSGVSNRFSGSKSGNTASLTISGLQAEDEADYYCSSYTSSSTLVFGTGTQLTVL

SEQ ID NO: 424 - DNA, 738 bp, synthetic construct
  misc_feature 1..738: note = source = /note="Description of Artificial Sequence: Synthetic polynucleotide"
  source 1..738: mol_type = other DNA
caagtccaactcgtccaatccggtgcagaagtcaagaaacctggagcatccgtgaaagtgtcctgcaaggcgtccgggtatacgttcacctcctactacatgcactgggtgcgccaggccccgggacagggactggaatggatgggaatcatcaatcctagcggcggcagcaccagctacgcccagaagtttcagggccgcgtgaccatgaccagggacactagcacctccaccgtgtacatggaattgtccagcctgagagccgaggatactgctgtgtactactgcgcccggggcggatacggagattatctggacgccttcgacatttggggacagggcactactgtgaccgtgtcctcggggggaggcggctcggggggcggcggatcaggatcaggcggttcccagtccgcgctgacacagcccgcttccgtgagcggttcgcccgggcagtccatcaccatttcgtgtaccggaacttcctccgacgtcggtggctacaactacgtgtcgtggtaccagcaacatccgggaaaggccccaaagctcatgatctacgaggtgtccaaccggccgtccggggtgtcaaaccggttcagcggctcaaagagcggaaacaccgcctccctcaccatctcgggactgcaggccgaggatgaagcggactactactgctcgagctacacttcctcatctaccctggtgttcgggactggtacccagcttaccgtgctg

SEQ ID NO: 425 - DNA, 831 bp, synthetic construct
  misc_feature 1..831: note = source = /note="Description of Artificial Sequence: Synthetic polynucleotide"
  source 1..831: mol_type = other DNA
atggccctccctgtcaccgccctgctgcttccgctggctcttctgctccacgccgctcggccccaagtccaactcgtccaatccggtgcagaagtcaagaaacctggagcatccgtgaaagtgtcctgcaaggcgtccgggtatacgttcacctcctactacatgcactgggtgcgccaggccccgggacagggactggaatggatgggaatcatcaatcctagcggcggcagcaccagctacgcccagaagtttcagggccgcgtgaccatgaccagggacactagcacctccaccgtgtacatggaattgtccagcctgagagccgaggatactgctgtgtactactgcgcccggggcggatacggagattatctggacgccttcgacatttggggacagggcactactgtgaccgtgtcctcggggggaggcggctcggggggcggcggatcaggatcaggcggttcccagtccgcgctgacacagcccgcttccgtgagcggttcgcccgggcagtccatcaccatttcgtgtaccggaacttcctccgacgtcggtggctacaactacgtgtcgtggtaccagcaacatccgggaaaggccccaaagctcatgatctacgaggtgtccaaccggccgtccggggtgtcaaaccggttcagcggctcaaagagcggaaacaccgcctccctcaccatctcgggactgcaggccgaggatgaagcggactactactgctcgagctacacttcctcatctaccctggtgttcgggactggtacccagcttaccgtgctgggatcgcaccaccatcaccatcatcatcac

SEQ ID NO: 426 - protein, 277 aa, synthetic construct
  REGION 1..277: note = source = /note="Description of Artificial Sequence: Synthetic polypeptide"
MALPVTALLLPLALLLHAARPQVQLVQSGAEVKKPGASVKVSCKASGYTFTSYYMHWVRQAPGQGLEWMGIINPSGGSTSYAQKFQGRVTMTRDTSTSTVYMELSSLRAEDTAVYYCARGGYGDYLDAFDIWGQGTTVTVSSGGGGSGGGGSGSGGSQSALTQPASVSGSPGQSITISCTGTSSDVGGYNYVSWYQQHPGKAPKLMIYEVSNRPSGVSNRFSGSKSGNTASLTISGLQAEDEADYYCSSYTSSSTLVFGTGTQLTVLGSHHHHHHHH

SEQ ID NO: 427 - protein, 490 aa, synthetic construct
  REGION 1..490: note = source = /note="Description of Artificial Sequence: Synthetic polypeptide"
MALPVTALLLPLALLLHAARPQVQLVQSGAEVKKPGASVKVSCKASGYTFTSYYMHWVRQAPGQGLEWMGIINPSGGSTSYAQKFQGRVTMTRDTSTSTVYMELSSLRAEDTAVYYCARGGYGDYLDAFDIWGQGTTVTVSSGGGGSGGGGSGSGGSQSALTQPASVSGSPGQSITISCTGTSSDVGGYNYVSWYQQHPGKAPKLMIYEVSNRPSGVSNRFSGSKSGNTASLTISGLQAEDEADYYCSSYTSSSTLVFGTGTQLTVLTTTPAPRPPTPAPTIASQPLSLRPEACRPAAGGAVHTRGLDFACDIYIWAPLAGTCGVLLLSLVITLYCKRGRKKLLYIFKQPFMRPVQTTQEEDGCSCRFPEEEEGGCELRVKFSRSADAPAYKQGQNQLYNELNLGRREEYDVLDKRRGRDPEMGGKPRRKNPQEGLYNELQKDKMAEAYSEIGMKGERRRGKGHDGLYQGLSTATKDTYDALHMQALPPR

SEQ ID NO: 428 - DNA, 1470 bp, synthetic construct
  misc_feature 1..1470: note = source = /note="Description of Artificial Sequence: Synthetic polynucleotide"
  source 1..1470: mol_type = other DNA
atggccctccctgtcaccgccctgctgcttccgctggctcttctgctccacgccgctcggccccaagtccaactcgtccaatccggtgcagaagtcaagaaacctggagcatccgtgaaagtgtcctgcaaggcgtccgggtatacgttcacctcctactacatgcactgggtgcgccaggccccgggacagggactggaatggatgggaatcatcaatcctagcggcggcagcaccagctacgcccagaagtttcagggccgcgtgaccatgaccagggacactagcacctccaccgtgtacatggaattgtccagcctgagagccgaggatactgctgtgtactactgcgcccggggcggatacggagattatctggacgccttcgacatttggggacagggcactactgtgaccgtgtcctcggggggaggcggctcggggggcggcggatcaggatcaggcggttcccagtccgcgctgacacagcccgcttccgtgagcggttcgcccgggcagtccatcaccatttcgtgtaccggaacttcctccgacgtcggtggctacaactacgtgtcgtggtaccagcaacatccgggaaaggccccaaagctcatgatctacgaggtgtccaaccggccgtccggggtgtcaaaccggttcagcggctcaaagagcggaaacaccgcctccctcaccatctcgggactgcaggccgaggatgaagcggactactactgctcgagctacacttcctcatctaccctggtgttcgggactggtacccagcttaccgtgctgaccactaccccagcaccgaggccacccaccccggctcctaccatcgcctcccagcctctgtccctgcgtccggaggcatgtagacccgcagctggtggggccgtgcatacccggggtcttgacttcgcctgcgatatctacatttgggcccctctggctggtacttgcggggtcctgctgctttcactcgtgatcactctttactgtaagcgcggtcggaagaagctgctgtacatctttaagcaacccttcatgaggcctgtgcagactactcaagaggaggacggctgttcatgccggttcccagaggaggaggaaggcggctgcgaactgcgcgtgaaattcagccgcagcgcagatgctccagcctacaagcaggggcagaaccagctctacaacgaactcaatcttggtcggagagaggagtacgacgtgctggacaagcggagaggacgggacccagaaatgggcgggaagccgcgcagaaagaatccccaagagggcctgtacaacgagctccaaaaggataagatggcagaagcctatagcgagattggtatgaaaggggaacgcagaagaggcaaaggccacgacggactgtaccagggactcagcaccgccaccaaggacacctatgacgctcttcacatgcaggccctgccgcctcgg

SEQ ID NO: 429 - protein, 17 aa, synthetic construct
  REGION 1..17: note = source = /note="Description of Artificial Sequence: Synthetic peptide"
IINPSGGSTSYAQKFQG

SEQ ID NO: 430 - protein, 17 aa, synthetic construct
  REGION 1..17: note = source = /note="Description of Artificial Sequence: Synthetic peptide"
IINPSGGSTSYAQKFQG

SEQ ID NO: 431 - protein, 17 aa, synthetic construct
  REGION 1..17: note = source = /note="Description of Artificial Sequence: Synthetic peptide"
IINPSGGSTSYAQKFQG

SEQ ID NO: 432 - protein, 17 aa, synthetic construct
  REGION 1..17: note = source = /note="Description of Artificial Sequence: Synthetic peptide"
GIIPIFGTANYAQKFQG

SEQ ID NO: 433 - protein, 17 aa, synthetic construct
  REGION 1..17: note = source = /note="Description of Artificial Sequence: Synthetic peptide"
IINPSGGSTSYAQKFQG

SEQ ID NO: 434 - protein, 17 aa, synthetic construct
  REGION 1..17: note = source = /note="Description of Artificial Sequence: Synthetic peptide"
YISSSSSTIYYADSVKG

SEQ ID NO: 435 - protein, 17 aa, synthetic construct
  REGION 1..17: note = source = /note="Description of Artificial Sequence: Synthetic peptide"
IINPSGGSTSYAQKFQG

SEQ ID NO: 436 - protein, 17 aa, synthetic construct
  REGION 1..17: note = source = /note="Description of Artificial Sequence: Synthetic peptide"
IIYPGDSDTRYSPSFQG

SEQ ID NO: 437 - protein, 16 aa, synthetic construct
  REGION 1..16: note = source = /note="Description of Artificial Sequence: Synthetic peptide"
FTSHSGNVKYNPSLTG

SEQ ID NO: 438 - protein, 17 aa, synthetic construct
  REGION 1..17: note = source = /note="Description of Artificial Sequence: Synthetic peptide"
YISSSGSTIYYADSVKG

SEQ ID NO: 439 - protein, 17 aa, synthetic construct
  REGION 1..17: note = source = /note="Description of Artificial Sequence: Synthetic peptide"
IINPSGGSTSYAQKFQG

SEQ ID NO: 440 - protein, 17 aa, synthetic construct
  REGION 1..17: note = source = /note="Description of Artificial Sequence: Synthetic peptide"
WINPNSGGTNYAQKFQG

SEQ ID NO: 441 - protein, 17 aa, synthetic construct
  REGION 1..17: note = source = /note="Description of Artificial Sequence: Synthetic peptide"
WMNPNSGNTGYAQKFQG

SEQ ID NO: 442 - protein, 17 aa, synthetic construct
  REGION 1..17: note = source = /note="Description of Artificial Sequence: Synthetic peptide"
WISAYNGNTNYAQKLQG

SEQ ID NO: 443 - protein, 16 aa, synthetic construct
  REGION 1..16: note = source = /note="Description of Artificial Sequence: Synthetic peptide"
LIDWDDDKYYSTSLRT

SEQ ID NO: 444 - protein, 16 aa, synthetic construct
  REGION 1..16: note = source = /note="Description of Artificial Sequence: Synthetic peptide"
QIYHSGTTTYNPSLGS

SEQ ID NO: 445 - protein, 17 aa, synthetic construct
  REGION 1..17: note = source = /note="Description of Artificial Sequence: Synthetic peptide"
IINPSGGSTSYAQKFQG

SEQ ID NO: 446 - protein, 17 aa, synthetic construct
  REGION 1..17: note = source = /note="Description of Artificial Sequence: Synthetic peptide"
IINPSGGSTSYAQKFQG

SEQ ID NO: 447 - protein, 17 aa, synthetic construct
  REGION 1..17: note = source = /note="Description of Artificial Sequence: Synthetic peptide"
IINPSGGSTSYAQKFQG

SEQ ID NO: 448 - protein, 17 aa, synthetic construct
  REGION 1..17: note = source = /note="Description of Artificial Sequence: Synthetic peptide"
IINPSGGSTSYAQKFQG

SEQ ID NO: 449 - protein, 12 aa, synthetic construct
  REGION 1..12: note = source = /note="Description of Artificial Sequence: Synthetic peptide"
EVTGDLEDAFDI

SEQ ID NO: 450 - protein, 18 aa, synthetic construct
  REGION 1..18: note = source = /note="Description of Artificial Sequence: Synthetic peptide"
QSTPYDSSGYYSGDAFDI

SEQ ID NO: 451 - protein, 13 aa, synthetic construct
  REGION 1..13: note = source = /note="Description of Artificial Sequence: Synthetic peptide"
DLGWIAVAGTFDY

SEQ ID NO: 452 - protein, 15 aa, synthetic construct
  REGION 1..15: note = source = /note="Description of Artificial Sequence: Synthetic peptide"
DRLQDGNSWSDAFDV

SEQ ID NO: 453 - protein, 13 aa, synthetic construct
  REGION 1..13: note = source = /note="Description of Artificial Sequence: Synthetic peptide"
GLSSWHFHDALDI

SEQ ID NO: 454 - protein, 15 aa, synthetic construct
  REGION 1..15: note = source = /note="Description of Artificial Sequence: Synthetic peptide"
DKGGGYYDFWSGSDY

SEQ ID NO: 455 - protein, 9 aa, synthetic construct
  REGION 1..9: note = source = /note="Description of Artificial Sequence: Synthetic peptide"
EGSGSYYAY

SEQ ID NO: 456 - protein, 13 aa, synthetic construct
  REGION 1..13: note = source = /note="Description of Artificial Sequence: Synthetic peptide"
DYWGYYGSGTLDY

SEQ ID NO: 457 - protein, 19 aa, synthetic construct
  REGION 1..19: note = source = /note="Description of Artificial Sequence: Synthetic peptide"
AGLALYSNYVPYYYYGMDV

SEQ ID NO: 458 - protein, 5 aa, synthetic construct
  REGION 1..5: note = source = /note="Description of Artificial Sequence: Synthetic peptide"
GATDV

SEQ ID NO: 459 - protein, 15 aa, synthetic construct
  REGION 1..15: note = source = /note="Description of Artificial Sequence: Synthetic peptide"
DRLQDGNSWSDAFDV

SEQ ID NO: 460 - protein, 15 aa, synthetic construct
  REGION 1..15: note = source = /note="Description of Artificial Sequence: Synthetic peptide"
EESSSGWYEGNWFDP

SEQ ID NO: 461 - protein, 15 aa, synthetic construct
  REGION 1..15: note = source = /note="Description of Artificial Sequence: Synthetic peptide"
DRLQDGNSWSDAFDV

SEQ ID NO: 462 - protein, 10 aa, synthetic construct
  REGION 1..10: note = source = /note="Description of Artificial Sequence: Synthetic peptide"
GRMDTAMAQI

SEQ ID NO: 463 - protein, 8 aa, synthetic construct
  REGION 1..8: note = source = /note="Description of Artificial Sequence: Synthetic peptide"
DLDVSLDI

SEQ ID NO: 464 - protein, 14 aa, synthetic construct
  REGION 1..14: note = source = /note="Description of Artificial Sequence: Synthetic peptide"
VHSSGYYHPGPNDY

SEQ ID NO: 465 - protein, 9 aa, synthetic construct
  REGION 1..9: note = source = /note="Description of Artificial Sequence: Synthetic peptide"
EAGVVAVDY

SEQ ID NO: 466 - protein, 13 aa, synthetic construct
  REGION 1..13: note = source = /note="Description of Artificial Sequence: Synthetic peptide"
EPLFGVVEEDVDY

SEQ ID NO: 467 - protein, 11 aa, synthetic construct
  REGION 1..11: note = source = /note="Description of Artificial Sequence: Synthetic peptide"
GSGSLGDAFDI

SEQ ID NO: 468 - protein, 12 aa, synthetic construct
  REGION 1..12: note = source = /note="Description of Artificial Sequence: Synthetic peptide"
DGFGELSGAFDI

SEQ ID NO: 469 - protein, 13 aa, synthetic construct
  REGION 1..13: note = source = /note="Description of Artificial Sequence: Synthetic peptide"
GPIGCSGGSCLDY

SEQ ID NO: 470 - protein, 12 aa, synthetic construct
  REGION 1..12: note = source = /note="Description of Artificial Sequence: Synthetic peptide"
GSYGDYGDAFDI

SEQ ID NO: 471 - protein, 9 aa, synthetic construct
  REGION 1..9: note = source = /note="Description of Artificial Sequence: Synthetic peptide"
DHKVVRFGY

SEQ ID NO: 472 - protein, 7 aa, synthetic construct
  REGION 1..7: note = source = /note="Description of Artificial Sequence: Synthetic peptide"
GDYYMDV

SEQ ID NO: 473 - protein, 15 aa, synthetic construct
  REGION 1..15: note = source = /note="Description of Artificial Sequence: Synthetic peptide"
DGPIRYFDHSKAFDI

SEQ ID NO: 474 - protein, 10 aa, synthetic construct
  REGION 1..10: note = source = /note="Description of Artificial Sequence: Synthetic peptide"
EMDDSSGPDY

SEQ ID NO: 475 - protein, 14 aa, synthetic construct
  REGION 1..14: note = source = /note="Description of Artificial Sequence: Synthetic peptide"
GFLRGGDCCGALDI

SEQ ID NO: 476 - protein, 13 aa, synthetic construct
  REGION 1..13: note = source = /note="Description of Artificial Sequence: Synthetic peptide"
GLDPLFAYDAFEI

SEQ ID NO: 477 - protein, 10 aa, synthetic construct
  REGION 1..10: note = source = /note="Description of Artificial Sequence: Synthetic peptide"
DDFWSGSVDY

SEQ ID NO: 478 - protein, 13 aa, synthetic construct
  REGION 1..13: note = source = /note="Description of Artificial Sequence: Synthetic peptide"
EDDSSGYTSPFDY

SEQ ID NO: 479 - protein, 16 aa, synthetic construct
  REGION 1..16: note = source = /note="Description of Artificial Sequence: Synthetic peptide"
EPASSSWYGYYYYMDV

SEQ ID NO: 480 - protein, 13 aa, synthetic construct
  REGION 1..13: note = source = /note="Description of Artificial Sequence: Synthetic peptide"
GDSNYWSYYGMDV

SEQ ID NO: 481 - protein, 9 aa, synthetic construct
  REGION 1..9: note = source = /note="Description of Artificial Sequence: Synthetic peptide"
FSSSDSYDY

SEQ ID NO: 482 - protein, 17 aa, synthetic construct
  REGION 1..17: note = source = /note="Description of Artificial Sequence: Synthetic peptide"
IYGGDRTNTQAPYFFDL

SEQ ID NO: 483 - protein, 13 aa, synthetic construct
  REGION 1..13: note = source = /note="Description of Artificial Sequence: Synthetic peptide"
DYLELATYYGMDV

SEQ ID NO: 484 - protein, 15 aa, synthetic construct
  REGION 1..15: note = source = /note="Description of Artificial Sequence: Synthetic peptide"
DLAAAGNYYYYGMDV

SEQ ID NO: 485 - protein, 13 aa, synthetic construct
  REGION 1..13: note = source = /note="Description of Artificial Sequence: Synthetic peptide"
DDDFWSGSGAFDI

SEQ ID NO: 486 - protein, 14 aa, synthetic construct
  REGION 1..14: note = source = /note="Description of Artificial Sequence: Synthetic peptide"
PEGVSYYDSSVLDY

SEQ ID NO: 487 - protein, 12 aa, synthetic construct
  REGION 1..12: note = source = /note="Description of Artificial Sequence: Synthetic peptide"
GGYGDYLDAFDI

SEQ ID NO: 488 - protein, 7 aa, synthetic construct
  REGION 1..7: note = source = /note="Description of Artificial Sequence: Synthetic peptide"
SNSAAWN

SEQ ID NO: 489 - protein, 9 aa, synthetic construct
  REGION 1..9: note = source = /note="Description of Artificial Sequence: Synthetic peptide"
GDSVSSNSA

SEQ ID NO: 490 - protein, 12 aa, synthetic construct
  REGION 1..12: note = source = /note="Description of Artificial Sequence: Synthetic peptide"
GDSVSNNNAAWN

SEQ ID NO: 491 - protein, 12 aa, synthetic construct
  REGION 1..12: note = source = /note="Description of Artificial Sequence: Synthetic peptide"
GDSVSSNSAAWN

SEQ ID NO: 492 - protein, 12 aa, synthetic construct
  REGION 1..12: note = source = /note="Description of Artificial Sequence: Synthetic peptide"
GDSVLSNSDTWN

SEQ ID NO: 493 - protein, 12 aa, synthetic construct
  REGION 1..12: note = source = /note="Description of Artificial Sequence: Synthetic peptide"
GDSVLSNSDTWN

SEQ ID NO: 494 - protein, 12 aa, synthetic construct
  REGION 1..12: note = source = /note="Description of Artificial Sequence: Synthetic peptide"
GDSVLSNSDTWN

SEQ ID NO: 495 - protein, 12 aa, synthetic construct
  REGION 1..12: note = source = /note="Description of Artificial Sequence: Synthetic peptide"
GDSVLSNSDTWN

SEQ ID NO: 496 - protein, 12 aa, synthetic construct
  REGION 1..12: note = source = /note="Description of Artificial Sequence: Synthetic peptide"
GDSVLSNSDTWN

SEQ ID NO: 497 - protein, 12 aa, synthetic construct
  REGION 1..12: note = source = /note="Description of Artificial Sequence: Synthetic peptide"
GDSVLSNSDTWN

SEQ ID NO: 498 - protein, 12 aa, synthetic construct
  REGION 1..12: note = source = /note="Description of Artificial Sequence: Synthetic peptide"
GDSMLSNSDTWN

SEQ ID NO: 499 - protein, 18 aa, synthetic construct
  REGION 1..18: note = source = /note="Description of Artificial Sequence: Synthetic peptide"
RTYYRSKWYSDYAVSVKS

SEQ ID NO: 500 - protein, 7 aa, synthetic construct
  REGION 1..7: note = source = /note="Description of Artificial Sequence: Synthetic peptide"
YYRSKWY

SEQ ID NO: 501 - protein, 18 aa, synthetic construct
  REGION 1..18: note = source = /note="Description of Artificial Sequence: Synthetic peptide"
RTYHRSTWYNDYVGSVKS

SEQ ID NO: 502 - protein, 18 aa, synthetic construct
  REGION 1..18: note = source = /note="Description of Artificial Sequence: Synthetic peptide"
RTFYRSKWYNDYAVSVKG

SEQ ID NO: 503 - protein, 18 aa, synthetic construct
  REGION 1..18: note = source = /note="Description of Artificial Sequence: Synthetic peptide"
RTYHRSTWYDDYASSVRG

SEQ ID NO: 504 - protein, 18 aa, synthetic construct
  REGION 1..18: note = source = /note="Description of Artificial Sequence: Synthetic peptide"
RTYHRSTWYDDYASSVRG

SEQ ID NO: 505 - protein, 18 aa, synthetic construct
  REGION 1..18: note = source = /note="Description of Artificial Sequence: Synthetic peptide"
RTYHRSTWYDDYASSVRG

SEQ ID NO: 506 - protein, 18 aa, synthetic construct
  REGION 1..18: note = source = /note="Description of Artificial Sequence: Synthetic peptide"
RTYHRSTWYDDYASSVRG

SEQ ID NO: 507 - protein, 18 aa, synthetic construct
  REGION 1..18: note = source = /note="Description of Artificial Sequence: Synthetic peptide"
RTYHRSTWYDDYASSVRG

SEQ ID NO: 508 - protein, 18 aa, synthetic construct
  REGION 1..18: note = source = /note="Description of Artificial Sequence: Synthetic peptide"
RTYHRSTWYDDYASSVRG

SEQ ID NO: 509 - protein, 18 aa, synthetic construct
  REGION 1..18: note = source = /note="Description of Artificial Sequence: Synthetic peptide"
RTYHRSTWYDDYASSVRG

SEQ ID NO: 510 - protein, 15 aa, synthetic construct
  REGION 1..15: note = source = /note="Description of Artificial Sequence: Synthetic peptide"
DPYDFWSGYPDAFDI

SEQ ID NO: 511 - protein, 15 aa, synthetic construct
  REGION 1..15: note = source = /note="Description of Artificial Sequence: Synthetic peptide"
DPYDFWSGYPDAFDI

SEQ ID NO: 512 - protein, 12 aa, synthetic construct
  REGION 1..12: note = source = /note="Description of Artificial Sequence: Synthetic peptide"
ETDYGDYGAFDI

SEQ ID NO: 513 - protein, 9 aa, synthetic construct
  REGION 1..9: note = source = /note="Description of Artificial Sequence: Synthetic peptide"
GDYYYGLDV

SEQ ID NO: 514 - protein, 15 aa, synthetic construct
  REGION 1..15: note = source = /note="Description of Artificial Sequence: Synthetic peptide"
DRLQDGNSWSDAFDV

SEQ ID NO: 515 - protein, 15 aa, synthetic construct
  REGION 1..15: note = source = /note="Description of Artificial Sequence: Synthetic peptide"
DRLQDGNSWSDAFDV

SEQ ID NO: 516 - protein, 15 aa, synthetic construct
  REGION 1..15: note = source = /note="Description of Artificial Sequence: Synthetic peptide"
DRLQDGNSWSDAFDV

SEQ ID NO: 517 - protein, 15 aa, synthetic construct
  REGION 1..15: note = source = /note="Description of Artificial Sequence: Synthetic peptide"
DRLQDGNSWSDAFDV

SEQ ID NO: 518 - protein, 15 aa, synthetic construct
  REGION 1..15: note = source = /note="Description of Artificial Sequence: Synthetic peptide"
DRLQDGNSWSDAFDV

SEQ ID NO: 519 - protein, 15 aa, synthetic construct
  REGION 1..15: note = source = /note="Description of Artificial Sequence: Synthetic peptide"
VRLQDGNSWSDAFDV

SEQ ID NO: 520 - protein, 15 aa, synthetic construct
  REGION 1..15: note = source = /note="Description of Artificial Sequence: Synthetic peptide"
VRLQDGNSWSDAFDV

SEQ ID NO: 521 - protein, 11 aa, synthetic construct
  REGION 1..11: note = source = /note="Description of Artificial Sequence: Synthetic peptide"
RASQTIWSYLN

SEQ ID NO: 522 - protein, 13 aa, synthetic construct
  REGION 1..13: note = source = /note="Description of Artificial Sequence: Synthetic peptide"
SGSSSNIGSNYVY

SEQ ID NO: 523 - protein, 14 aa, synthetic construct
  REGION 1..14: note = source = /note="Description of Artificial Sequence: Synthetic peptide"
TGTSSDVGGYNYVS

SEQ ID NO: 524 - protein, 14 aa, synthetic construct
  REGION 1..14: note = source = /note="Description of Artificial Sequence: Synthetic peptide"
TGTSSDVGGYNYVS

SEQ ID NO: 525 - protein, 11 aa, synthetic construct
  REGION 1..11: note = source = /note="Description of Artificial Sequence: Synthetic peptide"
QGDSLRSYYAS

SEQ ID NO: 526 - protein, 11 aa, synthetic construct
  REGION 1..11: note = source = /note="Description of Artificial Sequence: Synthetic peptide"
QGDSLRSYYAS

SEQ ID NO: 527 - protein, 14 aa, synthetic construct
  REGION 1..14: note = source = /note="Description of Artificial Sequence: Synthetic peptide"
TGTSSDVGGYNYVS

SEQ ID NO: 528 - protein, 14 aa, synthetic construct
  REGION 1..14: note = source = /note="Description of Artificial Sequence: Synthetic peptide"
TGTSSDVGGYNYVS

SEQ ID NO: 529 - protein, 13 aa, synthetic construct
  REGION 1..13: note = source = /note="Description of Artificial Sequence: Synthetic peptide"
TRSSGSIASNYVQ

SEQ ID NO: 530 - protein, 13 aa, synthetic construct
  REGION 1..13: note = source = /note="Description of Artificial Sequence: Synthetic peptide"
SGSSSNIGSNYVY

SEQ ID NO: 531 - protein, 14 aa, synthetic construct
  REGION 1..14: note = source = /note="Description of Artificial Sequence: Synthetic peptide"
TGTSSDVGGYNYVS

SEQ ID NO: 532 - protein, 11 aa, synthetic construct
  REGION 1..11: note = source = /note="Description of Artificial Sequence: Synthetic peptide"
QGDSLRSYYAS

SEQ ID NO: 533 - protein, 14 aa, synthetic construct
  REGION 1..14: note = source = /note="Description of Artificial Sequence: Synthetic peptide"
TGTSSDVGGYNYVS

SEQ ID NO: 534 - protein, 13 aa, synthetic construct
  REGION 1..13: note = source = /note="Description of Artificial Sequence: Synthetic peptide"
TGSSGSFASSYVQ

SEQ ID NO: 535 - protein, 14 aa, synthetic construct
  REGION 1..14: note = source = /note="Description of Artificial Sequence: Synthetic peptide"
SGTSSDVGGYNSVS

SEQ ID NO: 536 - protein, 11 aa, synthetic construct
  REGION 1..11: note = source = /note="Description of Artificial Sequence: Synthetic peptide"
QGDSLRTYYAT

SEQ ID NO: 537 - protein, 14 aa, synthetic construct
  REGION 1..14: note = source = /note="Description of Artificial Sequence: Synthetic peptide"
TGTSSDVGGYNYVS

SEQ ID NO: 538 - protein, 16 aa, synthetic construct
  REGION 1..16: note = source = /note="Description of Artificial Sequence: Synthetic peptide"
RSSQSLLAGNGHNYLD

SEQ ID NO: 539 - protein, 14 aa, synthetic construct
  REGION 1..14: note = source = /note="Description of Artificial Sequence: Synthetic peptide"
TGSSSDVGGYNYVS

SEQ ID NO: 540 - protein, 14 aa, synthetic construct
  REGION 1..14: note = source = /note="Description of Artificial Sequence: Synthetic peptide"
TGTSSDVGGYNYVS

SEQ ID NO: 541 - protein, 14 aa, synthetic construct
  REGION 1..14: note = source = /note="Description of Artificial Sequence: Synthetic peptide"
TGTNSDVGRYNYVS

SEQ ID NO: 542 - protein, 14 aa, synthetic construct
  REGION 1..14: note = source = /note="Description of Artificial Sequence: Synthetic peptide"
TGTSSDVGGYKYVS

SEQ ID NO: 543 - protein, 12 aa, synthetic construct
  REGION 1..12: note = source = /note="Description of Artificial Sequence: Synthetic peptide"
TLSSGHSSYAIA

SEQ ID NO: 544 - protein, 14 aa, synthetic construct
  REGION 1..14: note = source = /note="Description of Artificial Sequence: Synthetic peptide"
TGTSSDVGGYNYVS

SEQ ID NO: 545 - protein, 11 aa, synthetic construct
  REGION 1..11: note = source = /note="Description of Artificial Sequence: Synthetic peptide"
QGDSLRSYYAS

SEQ ID NO: 546 - protein, 14 aa, synthetic construct
  REGION 1..14: note = source = /note="Description of Artificial Sequence: Synthetic peptide"
TGTSSDVGGYNYVS

SEQ ID NO: 547 - protein, 16 aa, synthetic construct
  REGION 1..16: note = source = /note="Description of Artificial Sequence: Synthetic peptide"
RSSQSLLHSNGYNYLD

SEQ ID NO: 548 - protein, 16 aa, synthetic construct
  REGION 1..16: note = source = /note="Description of Artificial Sequence: Synthetic peptide"
RSSQSLLHSNGYNYLD

SEQ ID NO: 549 - protein, 11 aa, synthetic construct
  REGION 1..11: note = source = /note="Description of Artificial Sequence: Synthetic peptide"
GGTNIGSKNVH

SEQ ID NO: 550 - protein, 11 aa, synthetic construct
  REGION 1..11: note = source = /note="Description of Artificial Sequence: Synthetic peptide"
GGHNIRSKNVH

SEQ ID NO: 551 - protein, 11 aa, synthetic construct
  REGION 1..11: note = source = /note="Description of Artificial Sequence: Synthetic peptide"
RASQSINTYLN

SEQ ID NO: 552 - protein, 14 aa, synthetic construct
  REGION 1..14: note = source = /note="Description of Artificial Sequence: Synthetic peptide"
TGTSSDVGGYNYVS

SEQ ID NO: 553 - protein, 11 aa, synthetic construct
  REGION 1..11: note = source = /note="Description of Artificial Sequence: Synthetic peptide"
RASQSVTSNLA

SEQ ID NO: 554 - protein, 16 aa, synthetic construct
  REGION 1..16: note = source = /note="Description of Artificial Sequence: Synthetic peptide"
RSSQSLLHSNGYNYLD

SEQ ID NO: 555 - protein, 16 aa, synthetic construct
  REGION 1..16: note = source = /note="Description of Artificial Sequence: Synthetic peptide"
RSSQSLLYSDGYNYLD

SEQ ID NO: 556 - protein, 11 aa, synthetic construct
  REGION 1..11: note = source = /note="Description of Artificial Sequence: Synthetic peptide"
QGDSLRSYFTS

SEQ ID NO: 557 - protein, 11 aa, synthetic construct
  REGION 1..11: note = source = /note="Description of Artificial Sequence: Synthetic peptide"
QGDSLRSYYAS

SEQ ID NO: 558 - protein, 14 aa, synthetic construct
  REGION 1..14: note = source = /note="Description of Artificial Sequence: Synthetic peptide"
TGTSSDVGGYKHVS

SEQ ID NO: 559 - protein, 14 aa, synthetic construct
  REGION 1..14: note = source = /note="Description of Artificial Sequence: Synthetic peptide"
TGTSSDVGGYNYVS

SEQ ID NO: 560 - protein, 7 aa, synthetic construct
  REGION 1..7: note = source = /note="Description of Artificial Sequence: Synthetic peptide"
AASSLQS

SEQ ID NO: 561 - protein, 7 aa, synthetic construct
  REGION 1..7: note = source = /note="Description of Artificial Sequence: Synthetic peptide"
RNNQRPS

SEQ ID NO: 562 - protein, 7 aa, synthetic construct
  REGION 1..7: note = source = /note="Description of Artificial Sequence: Synthetic peptide"
DVSKRPS

SEQ ID NO: 563 - protein, 7 aa, synthetic construct
  REGION 1..7: note = source = /note="Description of Artificial Sequence: Synthetic peptide"
DVSNRPS

SEQ ID NO: 564 - protein, 7 aa, synthetic construct
  REGION 1..7: note = source = /note="Description of Artificial Sequence: Synthetic peptide"
GKNNRPS

SEQ ID NO: 565 - protein, 7 aa, synthetic construct
  REGION 1..7: note = source = /note="Description of Artificial Sequence: Synthetic peptide"
GKNNRPS

SEQ ID NO: 566 - protein, 7 aa, synthetic construct
  REGION 1..7: note = source = /note="Description of Artificial Sequence: Synthetic peptide"
DVSNRPS

SEQ ID NO: 567 - protein, 7 aa, synthetic construct
  REGION 1..7: note = source = /note="Description of Artificial Sequence: Synthetic peptide"
DVSSRPS

SEQ ID NO: 568 - protein, 7 aa, synthetic construct
  REGION 1..7: note = source = /note="Description of Artificial Sequence: Synthetic peptide"
EDNQRPS

SEQ ID NO: 569 - protein, 7 aa, synthetic construct
  REGION 1..7: note = source = /note="Description of Artificial Sequence: Synthetic peptide"
RNNQRPS

SEQ ID NO: 570 - protein, 7 aa, synthetic construct
  REGION 1..7: note = source = /note="Description of Artificial Sequence: Synthetic peptide"
DVSNRPS

SEQ ID NO: 571 - protein, 7 aa, synthetic construct
  REGION 1..7: note = source = /note="Description of Artificial Sequence: Synthetic peptide"
GKNHRPS

SEQ ID NO: 572 - protein, 7 aa, synthetic construct
  REGION 1..7: note = source = /note="Description of Artificial Sequence: Synthetic peptide"
DVSNRPS

SEQ ID NO: 573 - protein, 7 aa, synthetic construct
  REGION 1..7: note = source = /note="Description of Artificial Sequence: Synthetic peptide"
EDNQRPS

SEQ ID NO: 574 - protein, 7 aa, synthetic construct
  REGION 1..7: note = source = /note="Description of Artificial Sequence: Synthetic peptide"
DVNNRPS

SEQ ID NO: 575 - protein, 7 aa, synthetic construct
  REGION 1..7: note = source = /note="Description of Artificial Sequence: Synthetic peptide"
DENNRPS

SEQ ID NO: 576 - protein, 7 aa, synthetic construct
  REGION 1..7: note = source = /note="Description of Artificial Sequence: Synthetic peptide"
DVSNRPS

SEQ ID NO: 577 - protein, 7 aa, synthetic construct
  REGION 1..7: note = source = /note="Description of Artificial Sequence: Synthetic peptide"
LGSNRAS

SEQ ID NO: 578 - protein, 7 aa, synthetic construct
  REGION 1..7: note = source = /note="Description of Artificial Sequence: Synthetic peptide"
EVSNRPS

SEQ ID NO: 579 - protein, 7 aa, synthetic construct
  REGION 1..7: note = source = /note="Description of Artificial Sequence: Synthetic peptide"
DVSNRPS

SEQ ID NO: 580 - protein, 7 aa, synthetic construct
  REGION 1..7: note = source = /note="Description of Artificial Sequence: Synthetic peptide"
EVSYRPS

SEQ ID NO: 581 - protein, 7 aa, synthetic construct
  REGION 1..7: note = source = /note="Description of Artificial Sequence: Synthetic peptide"
DVSNRPS

SEQ ID NO: 582 - protein, 11 aa, synthetic construct
  REGION 1..11: note = source = /note="Description of Artificial Sequence: Synthetic peptide"
VNSDGSLSKGD

SEQ ID NO: 583 - protein, 7 aa, synthetic construct
  REGION 1..7: note = source = /note="Description of Artificial Sequence: Synthetic peptide"
EVSKRPS

SEQ ID NO: 584 - protein, 7 aa, synthetic construct
  REGION 1..7: note = source = /note="Description of Artificial Sequence: Synthetic peptide"
GKNNRPS

SEQ ID NO: 585 - protein, 7 aa, synthetic construct
  REGION 1..7: note = source = /note="Description of Artificial Sequence: Synthetic peptide"
EVSNRPS

SEQ ID NO: 586 - protein, 7 aa, synthetic construct
  REGION 1..7: note = source = /note="Description of Artificial Sequence: Synthetic peptide"
LGSNRAS

SEQ ID NO: 587 - protein, 7 aa, synthetic construct
  REGION 1..7: note = source = /note="Description of Artificial Sequence: Synthetic peptide"
LGSNRAS

SEQ ID NO: 588 - protein, 7 aa, synthetic construct
  REGION 1..7: note = source = /note="Description of Artificial Sequence: Synthetic peptide"
YDSDRPS

SEQ ID NO: 589 - protein, 7 aa, synthetic construct
  REGION 1..7: note = source = /note="Description of Artificial Sequence: Synthetic peptide"
YDGDRPS

SEQ ID NO: 590 - protein, 7 aa, synthetic construct
  REGION 1..7: note = source = /note="Description of Artificial Sequence: Synthetic peptide"
AASNLQS

SEQ ID NO: 591 - protein, 7 aa, synthetic construct
  REGION 1..7: note = source = /note="Description of Artificial Sequence: Synthetic peptide"
DADKRPS

SEQ ID NO: 592 - protein, 7 aa, synthetic construct
  REGION 1..7: note = source = /note="Description of Artificial Sequence: Synthetic peptide"
AASTRAT

SEQ ID NO: 593 - protein, 7 aa, synthetic construct
  REGION 1..7: note = source = /note="Description of Artificial Sequence: Synthetic peptide"
LGSNRAS

SEQ ID NO: 594 - protein, 7 aa, synthetic construct
  REGION 1..7: note = source = /note="Description of Artificial Sequence: Synthetic peptide"
LGSNRAS

SEQ ID NO: 595 - protein, 7 aa, synthetic construct
  REGION 1..7: note = source = /note="Description of Artificial Sequence: Synthetic peptide"
GNNNRPS

SEQ ID NO: 596 - protein, 7 aa, synthetic construct
  REGION 1..7: note = source = /note="Description of Artificial Sequence: Synthetic peptide"
GKNNRPS

SEQ ID NO: 597 - protein, 7 aa, synthetic construct
  REGION 1..7: note = source = /note="Description of Artificial Sequence: Synthetic peptide"
DVSNRPS

SEQ ID NO: 598 - protein, 7 aa, synthetic construct
  REGION 1..7: note = source = /note="Description of Artificial Sequence: Synthetic peptide"
EVSNRPS

SEQ ID NO: 599 - protein, 9 aa, synthetic construct
  REGION 1..9: note = source = /note="Description of Artificial Sequence: Synthetic peptide"
QQSYSIPQT

SEQ ID NO: 600 - protein, 11 aa, synthetic construct
  REGION 1..11: note = source = /note="Description of Artificial Sequence: Synthetic peptide"
AAWDDSLSGYV

SEQ ID NO: 601 - protein, 11 aa, synthetic construct
  REGION 1..11: note = source = /note="Description of Artificial Sequence: Synthetic peptide"
SSYTSSSLNHV

SEQ ID NO: 602 - protein, 11 aa, synthetic construct
  REGION 1..11: note = source = /note="Description of Artificial Sequence: Synthetic peptide"
SSYTSSSTPYV

SEQ ID NO: 603 - protein, 12 aa, synthetic construct
  REGION 1..12: note = source = /note="Description of Artificial Sequence: Synthetic peptide"
NSRDSSGNHLWV

SEQ ID NO: 604 - protein, 9 aa, synthetic construct
  REGION 1..9: note = source = /note="Description of Artificial Sequence: Synthetic peptide"
NSRDSSGWV

SEQ ID NO: 605 - protein, 11 aa, synthetic construct
  REGION 1..11: note = source = /note="Description of Artificial Sequence: Synthetic peptide"
SSYTSSSTLYV

SEQ ID NO: 606 - protein, 10 aa, synthetic construct
  REGION 1..10: note = source = /note="Description of Artificial Sequence: Synthetic peptide"
SSYAGSNTLV

SEQ ID NO: 607 - protein, 10 aa, synthetic construct
  REGION 1..10: note = source = /note="Description of Artificial Sequence: Synthetic peptide"
QSYDSSNPWV

SEQ ID NO: 608 - protein, 11 aa, synthetic construct
  REGION 1..11: note = source = /note="Description of Artificial Sequence: Synthetic peptide"
AAWDDSLSGPV

SEQ ID NO: 609 - protein, 12 aa, synthetic construct
  REGION 1..12: note = source = /note="Description of Artificial Sequence: Synthetic peptide"
SSYTSSSTLVYV

SEQ ID NO: 610 - protein, 10 aa, synthetic construct
  REGION 1..10: note = source = /note="Description of Artificial Sequence: Synthetic peptide"
HSRDSSGNHL

SEQ ID NO: 611 - protein, 11 aa, synthetic construct
  REGION 1..11: note = source = /note="Description of Artificial Sequence: Synthetic peptide"
SSYTSSSTLYV

SEQ ID NO: 612 - protein, 9 aa, synthetic construct
  REGION 1..9: note = source = /note="Description of Artificial Sequence: Synthetic peptide"
QSYDGATWV

SEQ ID NO: 613 - protein, 10 aa, synthetic construct
  REGION 1..10: note = source = /note="Description of Artificial Sequence: Synthetic peptide"
SSYTSSSTLF

SEQ ID NO: 614 - protein, 12 aa, synthetic construct
  REGION 1..12: note = source = /note="Description of Artificial Sequence: Synthetic peptide"
SSRDSSGNPSCV

SEQ ID NO: 615 - protein, 10 aa, synthetic construct
  REGION 1..10: note = source = /note="Description of Artificial Sequence: Synthetic peptide"
SSYTSSSTWV

SEQ ID NO: 616 - protein, 9 aa, synthetic construct
  REGION 1..9: note = source = /note="Description of Artificial Sequence: Synthetic peptide"
MQALQNPLT

SEQ ID NO: 617 - protein, 10 aa, synthetic construct
  REGION 1..10: note = source = /note="Description of Artificial Sequence: Synthetic peptide"
SSYTSSSTLV

SEQ ID NO: 618 - protein, 10 aa, synthetic construct
  REGION 1..10: note = source = /note="Description of Artificial Sequence: Synthetic peptide"
SSYASSSTLV

SEQ ID NO: 619 - protein, 10 aa, synthetic construct
  REGION 1..10: note = source = /note="Description of Artificial Sequence: Synthetic peptide"
SSYTTSSTLD

SEQ ID NO: 620 - protein, 10 aa, synthetic construct
  REGION 1..10: note = source = /note="Description of Artificial Sequence: Synthetic peptide"
SSYTSSSTLV

SEQ ID NO: 621 - protein, 9 aa, synthetic construct
  REGION 1..9: note = source = /note="Description of Artificial Sequence: Synthetic peptide"
QTWGSGMAI

SEQ ID NO: 622 - protein, 10 aa, synthetic construct
  REGION 1..10: note = source = /note="Description of Artificial Sequence: Synthetic peptide"
SSYTSSGTLV

SEQ ID NO: 623 - protein, 11 aa, synthetic construct
  REGION 1..11: note = source = /note="Description of Artificial Sequence: Synthetic peptide"
NSRDSSGNPYV

SEQ ID NO: 624 - protein, 10 aa, synthetic construct
  REGION 1..10: note = source = /note="Description of Artificial Sequence: Synthetic peptide"
SSYTSSSTLV

SEQ ID NO: 625 - protein, 10 aa, synthetic construct
  REGION 1..10: note = source = /note="Description of Artificial Sequence: Synthetic peptide"
MQALQTPPWT

SEQ ID NO: 626 - protein, 10 aa, synthetic construct
  REGION 1..10: note = source = /note="Description of Artificial Sequence: Synthetic peptide"
MQVLQTPPLT

SEQ ID NO: 627 - protein, 11 aa, synthetic construct
  REGION 1..11: note = source = /note="Description of Artificial Sequence: Synthetic peptide"
QVWDSSSDHWV

SEQ ID NO: 628 - protein, 11 aa, synthetic construct
  REGION 1..11: note = source = /note="Description of Artificial Sequence: Synthetic peptide"
QVWDSDSDHYV

SEQ ID NO: 629 - protein, 9 aa, synthetic construct
  REGION 1..9: note = source = /note="Description of Artificial Sequence: Synthetic peptide"
QQSYSSLLT

SEQ ID NO: 630 - protein, 10 aa, synthetic construct
  REGION 1..10: note = source = /note="Description of Artificial Sequence: Synthetic peptide"
CSYAGGSTWV

SEQ ID NO: 631 - protein, 10 aa, synthetic construct
  REGION 1..10: note = source = /note="Description of Artificial Sequence: Synthetic peptide"
QQYHTWPPLT

SEQ ID NO: 632 - protein, 9 aa, synthetic construct
  REGION 1..9: note = source = /note="Description of Artificial Sequence: Synthetic peptide"
MQALQTPWT

SEQ ID NO: 633 - protein, 8 aa, synthetic construct
  REGION 1..8: note = source = /note="Description of Artificial Sequence: Synthetic peptide"
MQALQTQS

SEQ ID NO: 634 - protein, 11 aa, synthetic construct
  REGION 1..11: note = source = /note="Description of Artificial Sequence: Synthetic peptide"
DSRDSSGDHLV

SEQ ID NO: 635 - protein, 12 aa, synthetic construct
  REGION 1..12: note = source = /note="Description of Artificial Sequence: Synthetic peptide"
NSRDSSGNHPVV

SEQ ID NO: 636 - protein, 10 aa, synthetic construct
  REGION 1..10: note = source = /note="Description of Artificial Sequence: Synthetic peptide"
VSYRNFNSLV

SEQ ID NO: 637 - protein, 10 aa, synthetic construct
  REGION 1..10: note = source = /note="Description of Artificial Sequence: Synthetic peptide"
SSYTSSSTLV

SEQ ID NO: 638 - protein, 14 aa, synthetic construct
  REGION 1..14: note = source = /note="Description of Artificial Sequence: Synthetic peptide"
TGTSSDVGGYNYVS

SEQ ID NO: 639 - protein, 10 aa, synthetic construct
  REGION 1..10: note = source = /note="Description of Artificial Sequence: Synthetic peptide"
TSSDVGGYNY

SEQ ID NO: 640 - protein, 14 aa, synthetic construct
  REGION 1..14: note = source = /note="Description of Artificial Sequence: Synthetic peptide"
TGSRNDIGAYESVS

SEQ ID NO: 641 - protein, 14 aa, synthetic construct
  REGION 1..14: note = source = /note="Description of Artificial Sequence: Synthetic peptide"
TGSSSDVGGYNSVS

SEQ ID NO: 642 - protein, 14 aa, synthetic construct
  REGION 1..14: note = source = /note="Description of Artificial Sequence: Synthetic peptide"
TGSSSDIGGFNYVS

SEQ ID NO: 643 - protein, 14 aa, synthetic construct
  REGION 1..14: note = source = /note="Description of Artificial Sequence: Synthetic peptide"
TGTSSDIGGYNYVS

SEQ ID NO: 644 - protein, 14 aa, synthetic construct
  REGION 1..14: note = source = /note="Description of Artificial Sequence: Synthetic peptide"
TGTSSDVGGYNYVS

SEQ ID NO: 645 - protein, 14 aa, synthetic construct
  REGION 1..14: note = source = /note="Description of Artificial Sequence: Synthetic peptide"
TGTSSDVGGYNYVS

SEQ ID NO: 646 - protein, 14 aa, synthetic construct
  REGION 1..14: note = source = /note="Description of Artificial Sequence: Synthetic peptide"
TGTSSDVGGYNYVS

SEQ ID NO: 647 - protein, 14 aa, synthetic construct
  REGION 1..14: note = source = /note="Description of Artificial Sequence: Synthetic peptide"
TGTSSDVGGYNYVS

SEQ ID NO: 648 - protein, 14 aa, synthetic construct
  REGION 1..14: note = source = /note="Description of Artificial Sequence: Synthetic peptide"
TGTSSDVGGYNYVS

SEQ ID NO: 649 - protein, 7 aa, synthetic construct
  REGION 1..7: note = source = /note="Description of Artificial Sequence: Synthetic peptide"
EVNNRPS

SEQ ID NO: 650 - skipped

SEQ ID NO: 651 - protein, 7 aa, synthetic construct
  REGION 1..7: note = source = /note="Description of Artificial Sequence: Synthetic peptide"
GVNNRPS

SEQ ID NO: 652 - protein, 7 aa, synthetic construct
  REGION 1..7: note = source = /note="Description of Artificial Sequence: Synthetic peptide"
EVINRPS

SEQ ID NO: 653 - protein, 7 aa, synthetic construct
  REGION 1..7: note = source = /note="Description of Artificial Sequence: Synthetic peptide"
EVTNRPS

SEQ ID NO: 654 - protein, 7 aa, synthetic construct
  REGION 1..7: note = source = /note="Description of Artificial Sequence: Synthetic peptide"
EVSNRPS

SEQ ID NO: 655 - protein, 7 aa, synthetic construct
  REGION 1..7: note = source = /note="Description of Artificial Sequence: Synthetic peptide"
EVSNRPS

SEQ ID NO: 656 - protein, 7 aa, synthetic construct
  REGION 1..7: note = source = /note="Description of Artificial Sequence: Synthetic peptide"
DVSNRPS

SEQ ID NO: 657 - protein, 7 aa, synthetic construct
  REGION 1..7: note = source = /note="Description of Artificial Sequence: Synthetic peptide"
EVSNRPS

SEQ ID NO: 658 - protein, 7 aa, synthetic construct
  REGION 1..7: note = source = /note="Description of Artificial Sequence: Synthetic peptide"
DVSNRPS

SEQ ID NO: 659 - protein, 7 aa, synthetic construct
  REGION 1..7: note = source = /note="Description of Artificial Sequence: Synthetic peptide"
DVSNRPS

SEQ ID NO: 660 - protein, 11 aa, synthetic construct
  REGION 1..11: note = source = /note="Description of Artificial Sequence: Synthetic peptide"
SSYTSGRTLYV

SEQ ID NO: 661 - protein, 8 aa, synthetic construct
  REGION 1..8: note = source = /note="Description of Artificial Sequence: Synthetic peptide"
YTSGRTLY

SEQ ID NO: 662 - protein, 11 aa, synthetic construct
  REGION 1..11: note = source = /note="Description of Artificial Sequence: Synthetic peptide"
SSHTTTSTLYV

SEQ ID NO: 663 - protein, 10 aa, synthetic construct
  REGION 1..10: note = source = /note="Description of Artificial Sequence: Synthetic peptide"
SSYTSSSTYV

SEQ ID NO: 664 - protein, 11 aa, synthetic construct
  REGION 1..11: note = source = /note="Description of Artificial Sequence: Synthetic peptide"
SSYASGSPLYV

SEQ ID NO: 665 - protein, 11 aa, synthetic construct
  REGION 1..11: note = source = /note="Description of Artificial Sequence: Synthetic peptide"
SSYTSSSTLYV

SEQ ID NO: 666 - protein, 11 aa, synthetic construct
  REGION 1..11: note = source = /note="Description of Artificial Sequence: Synthetic peptide"
SSYTSSSTLYV

SEQ ID NO: 667 - protein, 11 aa, synthetic construct
  REGION 1..11: note = source = /note="Description of Artificial Sequence: Synthetic peptide"
SSYTSSSTLYV

SEQ ID NO: 668 - protein, 11 aa, synthetic construct
  REGION 1..11: note = source = /note="Description of Artificial Sequence: Synthetic peptide"
SSYTSSSTLYI

SEQ ID NO: 669 - protein, 11 aa, synthetic construct
  REGION 1..11: note = source = /note="Description of Artificial Sequence: Synthetic peptide"
SSYTSSSTLYV

SEQ ID NO: 670 - protein, 11 aa, synthetic construct
  REGION 1..11: note = source = /note="Description of Artificial Sequence: Synthetic peptide"
SSYTSSSTLYV

SEQ ID NO: 671 - protein, 127 aa, synthetic construct
  REGION 1..127: note = source = /note="Description of Artificial Sequence: Synthetic polypeptide"
EVQLQQSGPGLVKPSQTLSLTCAISGDSVSSNSAAWNWIRQSPSRGLEWLGRTYYRSKWYSDYAVSVKSRITINPDTSKNQFSLQLNSVTPEDTAVYYCARDPYDFWSGYPDAFDIWGQGTMVTVSS

SEQ ID NO: 672 - protein, 124 aa, synthetic construct
  REGION 1..124: note = source = /note="Description of Artificial Sequence: Synthetic polypeptide"
EVQLQQSGPGLVKPSQTLSLTCAISGDSVSNNNAAWNWIRQSPSRGLEWLGRTYHRSTWYNDYVGSVKSRITINPDTSKNQFSLQLNSVTPEDTAVYYCARETDYGDYGAFDIWGQGTTVTVSS

SEQ ID NO: 673 - protein, 121 aa, synthetic construct
  REGION 1..121: note = source = /note="Description of Artificial Sequence: Synthetic polypeptide"
EVQLQQSGPGLVNPSQTLSITCAISGDSVSSNSAAWNWIRQSPSRGLEWLGRTFYRSKWYNDYAVSVKGRITISPDTSKNQFSLQLNSVTPEDTAVYYCAGGDYYYGLDVWGQGTTVTVSS

SEQ ID NO: 674 - protein, 127 aa, synthetic construct
  REGION 1..127: note = source = /note="Description of Artificial Sequence: Synthetic polypeptide"
EVQLQQSGPGLVKPSQTLSLTCAISGDSVLSNSDTWNWIRQSPSRGLEWLGRTYHRSTWYDDYASSVRGRVSINVDTSKNQYSLQLNAVTPEDTGVYYCARDRLQDGNSWSDAFDVWGQGTMVTVSS

SEQ ID NO: 675 - protein, 127 aa, synthetic construct; identical to SEQ ID NO: 674
  REGION 1..127: note = source = /note="Description of Artificial Sequence: Synthetic polypeptide"

SEQ ID NO: 676 - protein, 127 aa, synthetic construct
  REGION 1..127: note = source = /note="Description of Artificial Sequence: Synthetic polypeptide"
QVQLQESGPGLVKPSQTLSLTCAISGDSVLSNSDTWNWIRQSPSRGLEWLGRTYHRSTWYDDYASSVRGRVSINVDTSKNQYSLQLNAVTPEDTGVYYCARDRLQDGNSWSDAFDVWGQGTMVTVSS

SEQ ID NO: 677 - protein, 127 aa, synthetic construct; identical to SEQ ID NO: 674
  REGION 1..127: note = source = /note="Description of Artificial Sequence: Synthetic polypeptide"

SEQ ID NO: 678 - protein, 127 aa, synthetic construct; identical to SEQ ID NO: 674
  REGION 1..127: note = source = /note="Description of Artificial Sequence: Synthetic polypeptide"

SEQ ID NO: 679 - protein, 127 aa, synthetic construct
  REGION 1..127: note = source = /note="Description of Artificial Sequence: Synthetic polypeptide"
EVQLQQSGPGLVKPSQTLPLTCAISGDSVLSNSDTWNWIRQSPSRGLEWLGRTYHRSTWYDDYASSVRGRVSINVDTSKNQYSLQLNAVTPEDTGVYYCARVRLQDGNSWSDAFDVWGQGTMVTVSS

SEQ ID NO: 680 - protein, 127 aa, synthetic construct
  REGION 1..127: note = source = /note="Description of Artificial Sequence: Synthetic polypeptide"
EVQLQQSGPGLVKPSQTLSLTCAISGDSMLSNSDTWNWIRQSPSRGLEWLGRTYHRSTWYDDYASSVRGRVSINVDTSKNQYSLQLNAVTPEDTGVYYCARVRLQDGNSWSDAFDVWGQGTMVTVSS

SEQ ID NO: 681 - protein, 112 aa, synthetic construct
  REGION 1..112: note = source = /note="Description of Artificial Sequence: Synthetic polypeptide"
QSALTQPASVSGSPGQSITISCTGTSSDVGGYNYVSWYQQHPGKAPKVIISEVNNRPSGVSHRFSGSKSGNTASLTISGLQAEDEADYFCSSYTSGRTLYVFGTGSKVTVLG

SEQ ID NO: 682 - protein, 112 aa, synthetic construct
  REGION 1..112: note = source = /note="Description of Artificial Sequence: Synthetic polypeptide"
QSALTQPASVSGSPGQSITISCTGSRNDIGAYESVSWYQQHPGNAPKLIIHGVNNRPSGVFDRFSVSQSGNTASLTISGLQAEDEADYYCSSHTTTSTLYVFGTGTKVTVLG

SEQ ID NO: 683 - protein, 111 aa, synthetic construct
  REGION 1..111: note = source = /note="Description of Artificial Sequence: Synthetic polypeptide"
QSALTQPASVSGSPGQSITISCTGSSSDVGGYNSVSWYQQHPGKAPKLMIYEVINRPSGVSHRFSGSKSGNTASLTISGLQAEDEADYYCSSYTSSSTYVFGTGTKVTVLG

SEQ ID NO: 684 - protein, 112 aa, synthetic construct
  REGION 1..112: note = source = /note="Description of Artificial Sequence: Synthetic polypeptide"
QSALTQPASVSGSPGQSITISCTGSSSDIGGFNYVSWYQQHAGEAPKLMIYEVTNRPSGVSDRFSGSKSDNTASLTISGLQAEDEADYYCSSYASGSPLYVFGTGTKVTVLG

SEQ ID NO: 685 - protein, 112 aa, synthetic construct
  REGION 1..112: note = source = /note="Description of Artificial Sequence: Synthetic polypeptide"
QSALTQPASVSGSPGQSITFSCTGTSSDIGGYNYVSWYQQHPGKAPKLMIYEVSNRPSGVSNRFSGTKSGNTASLTISGLQAEDEADYYCSSYTSSSTLYVFGTGTKLTVLG

SEQ ID NO: 686 - protein, 112 aa, synthetic construct
  REGION 1..112: note = source = /note="Description of Artificial Sequence: Synthetic polypeptide"
QSALTQPASVSGSPGQSITISCTGTSSDVGGYNYVSWYQQHPGKAPKLMIYEVSNRPSGVSNRFSGSKSGNTASLTISGLQAEDEADYYCSSYTSSSTLYVFGTGTKVTVLG

SEQ ID NO: 687 - protein, 112 aa, synthetic construct
  REGION 1..112: note = source = /note="Description of Artificial Sequence: Synthetic polypeptide"
QSALTQPASVSGSPGQSITISCTGTSSDVGGYNYVSWYQQHPGKAPKLMIYDVSNRPSGVSNRFSGSKSGNTASLTISGLQAEDEADYYCSSYTSSSTLYVFGTGTKVTVLG

SEQ ID NO: 688 - protein, 112 aa, synthetic construct
  REGION 1..112: note = source = /note="Description of Artificial Sequence: Synthetic polypeptide"
QSALTQPASVSGSPGQSITISCTGTSSDVGGYNYVSWYQQHPGKAPKLMIYEVSNRPSGVSNRFSGSKSGNTASLTISGLQAEDEADYYCSSYTSSSTLYIFGTGTKVTVLG

SEQ ID NO: 689 - protein, 111 aa, synthetic construct
  REGION 1..111: note = source = /note="Description of Artificial Sequence: Synthetic polypeptide"
QSALTQPASASGSPGQSVTISCTGTSSDVGGYNYVSWYQQHPGKAPKLMIYDVSNRPSGVSNRFSGSKSGNTASLTISGLQAEDEADYYCSSYTSSSTLYVFGTGTQLTVL

SEQ ID NO: 690 - protein, 111 aa, synthetic construct; identical to SEQ ID NO: 689
  REGION 1..111: note = source = /note="Description of Artificial Sequence: Synthetic polypeptide"

SEQ ID NO: 691 - protein, 251 aa, synthetic construct
  REGION 1..251: note = source = /note="Description of Artificial Sequence: Synthetic polypeptide"
QVQLVESGGGVVQPGRSLRLSCAASGFTFRDYYMAWVRQAPGKGLEWVASISYEGNPYYGDSVKGRFTISRDNAKSTLYLQMSSLRAEDTAVYYCARHDHNNVDWFAYWGQGTLVTVSSGGGGSGGGGSGGGGSGGGGSDIVMTQTPLSLSVTPGQPVSMSCKSSQSLLYSENKKNYLAWYLQKPGQSPQLLIFWASTRESGVPDRFSGSGSGTDFTLKISRVEAEDVGVYYCQQYYNFPTFGQGTKLEIK

SEQ ID NO: 692 - protein, 251 aa, synthetic construct
  REGION 1..251: note = source = /note="Description of Artificial Sequence: Synthetic polypeptide"
QVQLVQSGAEVKKPGASVKVSCKASGFTFRDYYMAWVRQAPGQRLEWMGSISYEGNPYYGDSVKGRVTITRDNSASTLYMELSSLRSEDTAVYYCARHDHNNVDWFAYWGQGTLVTVSSGGGGSGGGGSGGGGSGGGGSDIQMTQSPSSLSASVGDRVTITCKSSQSLLYSENKKNYLAWYQQKPGKVPKLLIFWASTRESGVPSRFSGSGSGTDFTLTISSLQPEDVATYYCQQYYNFPTFGQGTKLEIK

SEQ ID NO: 693 - protein, 251 aa, synthetic construct
  REGION 1..251: note = source = /note="Description of Artificial Sequence: Synthetic polypeptide"
EVQLVQSGAEVKKPGESLKISCKGSGFTFRDYYMAWVRQMPGKGLEWMGSISYEGNPYYGDSVKGQVTISRDNSISTLYLQWSSLKASDTAMYYCARHDHNNVDWFAYWGQGTLVTVSSGGGGSGGGGSGGGGSGGGGSEIVMTQSPATLSLSPGERATLSCKSSQSLLYSENKKNYLAWYQQKPGQAPRLLIFWASTRESGIPARFSGSGSGTDFTLTISSLQPEDLAVYYCQQYYNFPTFGQGTKLEIK

SEQ ID NO: 694 - protein, 251 aa, synthetic construct
  REGION 1..251: note = source = /note="Description of Artificial Sequence: Synthetic polypeptide"
EVQLVQSGAEVKKPGESLKISCKGSGFTFRDYYMAWVRQMPGKGLEWMGSISYEGNPYYGDSVKGQVTISRDNSISTLYLQWSSLKASDTAMYYCARHDHNNVDWFAYWGQGTLVTVSSGGGGSGGGGSGGGGSGGGGSDIQMTQSPSSLSASVGDRVTITCKSSQSLLYSENKKNYLAWYQQKPGKVPKLLIFWASTRESGVPSRFSGSGSGTDFTLTISSLQPEDVATYYCQQYYNFPTFGQGTKLEIK

SEQ ID NO: 695 - protein, 251 aa, synthetic construct
  REGION 1..251: note = source = /note="Description of Artificial Sequence: Synthetic polypeptide"
QVQLVQSGAEVKKPGASVKVSCKASGFTFRDYYMAWVRQAPGQGLEWMGSISYEGNPYYGDSVKGRVTMTRDNSTSTLYMELSSLRSEDTAVYYCARHDHNNVDWFAYWGQGTLVTVSSGGGGSGGGGSGGGGSGGGGSEIVMTQSPATLSLSPGERATLSCKSSQSLLYSENKKNYLAWYQQKPGQAPRLLIFWASTRESGIPARFSGSGSGTDFTLTISSLQPEDLAVYYCQQYYNFPTFGQGTKLEIK

SEQ ID NO: 696 - protein, 251 aa, synthetic construct
  REGION 1..251: note = source = /note="Description of Artificial Sequence: Synthetic polypeptide"
QVQLVQSGAEVKKPGASVKVSCKASGFTFRDYYMAWVRQAPGQGLEWMGSISYEGNPYYGDSVKGRVTMTRDNSTSTLYMELSSLRSEDTAVYYCARHDHNNVDWFAYWGQGTLVTVSSGGGGSGGGGSGGGGSGGGGSDIQMTQSPSSLSASVGDRVTITCKSSQSLLYSENKKNYLAWYQQKPGKVPKLLIFWASTRESGVPSRFSGSGSGTDFTLTISSLQPEDVATYYCQQYYNFPTFGQGTKLEIK

SEQ ID NO: 697 - protein, 10 aa, synthetic construct
  REGION 1..10: note = source = /note="Description of Artificial Sequence: Synthetic peptide"
EYTFTDYAFH

SEQ ID NO: 698 - protein, 10 aa, synthetic construct
  REGION 1..10: note = source = /note="Description of Artificial Sequence: Synthetic peptide"
GFTFSKYGMN

SEQ ID NO: 699 - protein, 10 aa, synthetic construct
  REGION 1..10: note = source = /note="Description of Artificial Sequence: Synthetic peptide"
GFTFRDYYMA

SEQ ID NO: 700 - protein, 122 aa, synthetic construct
  REGION 1..122: note = source = /note="Description of Artificial Sequence: Synthetic polypeptide"
QVQLQQSGPGLVKPSQTLSLTCAISGDSVSSNSAAWNWIRQSPSRGLEWLGRTYYRSKWYNDYAVSVKSRITINPDTSKNQFSLQLNSVTPEDTAVYYCAREVTGDLEDAFDIWGQGTMVTV

SEQ ID NO: 701 - protein, 124 aa, synthetic construct
  REGION 1..124: note = source = /note="Description of Artificial Sequence: Synthetic polypeptide"
QVQLVQSGGGLIQPGGSLRLSCAASGFTVSSNYMSWVRQAPGKGLEWVSVIYSGGSTYYADSVKGRFTISRDNSKNTLYLQMNSLRAEDTAVYYCASQSTPYDSSGYYSGDAFDIWGQGTMVTV

SEQ ID NO: 702 - protein, 123 aa, synthetic construct
  REGION 1..123: note = source = /note="Description of Artificial Sequence: Synthetic polypeptide"
EVQLQQSGPGLVKPSQTLSLTCAISGDSVSSNSAAWNWIRQSPSRGLEWLGRTYYRSKWYNDYAVSVKSRITINPDTSKNQFSLQLNSVTPEDTAVYYCARDLGWIAVAGTFDYWGQGTLVTV

SEQ ID NO: 703 - protein, 125 aa, synthetic construct
  REGION 1..125: note = source = /note="Description of Artificial Sequence: Synthetic polypeptide"
EVQLQQSGPGLVKPSQTLSLTCAISGDSVLSNSDTWNWIRQSPSRGLEWLGRTYHRSTWYDDYASSVRGRVSINVDTSKNQYSLQLNAVTPEDTGAYYCARDRLQDGNSWSDAFDVWGQGTMVTV

SEQ ID NO: 704 - protein, 120 aa, synthetic construct
  REGION 1..120: note = source = /note="Description of Artificial Sequence: Synthetic polypeptide"
EVQLVESGGGLVQPGRSLRLSCAASGFTFDDYAMHWVRQAPGKGLEWVSGISWNSGSIGYADSVKGRFTISRDNAKNSLYLQMNSLRAEDTALYYCAKGLSSWHFHDALDIWGQGTMVTV

SEQ ID NO: 705 - protein, 122 aa, synthetic construct
  REGION 1..122: note = source = /note="Description of Artificial Sequence: Synthetic polypeptide"
EVQLVESGGGLVQPGRSLRLSCAASGFTFDDYAMHWVRQAPGKGLEWVSGISWNSGSIGYADSVKGRFTISRDNAKNSLYLQMNSLRAEDTALYYCAKDKGGGYYDFWSGSDYWGQGTLVTV

SEQ ID NO: 706 - protein, 119 aa, synthetic construct
  REGION 1..119: note = source = /note="Description of Artificial Sequence: Synthetic polypeptide"
EVQLQQSGPGLVKPSLTLSLTCAISGDSVSSNSATWTWIRQSPSRGLEWLGRTYYRSTWYNDYAVSVKSRITINPDTSKNQFSLQLNSVTPEDTAVYYCAREGSGSYYAYWGQGTLVTV

SEQ ID NO: 707 - protein, 120 aa, synthetic construct
  REGION 1..120: note = source = /note="Description of Artificial Sequence: Synthetic polypeptide"
QVQLVQSGAEVKKPGASVKVSCKASGYTFTGYYMHWVRQAPGQGLEWMGWINPNSGGTNYAQKFQGRVTMTRDTSISTAYMELSRLRSDDTAVYYCARDYWGYYGSGTLDYWGQGTLVTV

SEQ ID NO: 708 - protein, 126 aa, synthetic construct
  REGION 1..126: note = source = /note="Description of Artificial Sequence: Synthetic polypeptide"
QVQLVQSGAEVKKPGASVKVSCKASGYTFTSYGISWVRQAPGQGLEWMGWISAYNGNTNYAQKLQGRVTMTTDTSTSTAYMELRSLRSDDTAVYYCARAGLALYSNYVPYYYYGMDVWGQGTTVTV

SEQ ID NO: 709 - protein, 114 aa, synthetic construct
  REGION 1..114: note = source = /note="Description of Artificial Sequence: Synthetic polypeptide"
EVQLVESGGGLVKPGGSLRLSCVASGFTFSNAWMNWVRQAPGKGLEWVGRIKSKTDGGTADYAAPVKGRFTISRDDSKNTMYLQMNSLKTEDTGVYYCITGATDVWGQGTTVTV

SEQ ID NO: 710 - protein, 125 aa, synthetic construct
  REGION 1..125: note = source = /note="Description of Artificial Sequence: Synthetic polypeptide"
EVQLQQSGPGLVKPSQTLSLTCAISGDSVLSNSDTWNWIRQSPSRGLEWLGRTYHRSTWYDDYASSVRGRVSINVDTSKNQYSLQLNAVTPEDTGVYYCARDRLQDGNSWSDAFDVWGQGTMVTV

SEQ ID NO: 711 - protein, 125 aa, synthetic construct
  REGION 1..125: note = source = /note="Description of Artificial Sequence: Synthetic polypeptide"
EVQLQQSGPGLVKPSQTLSLTCAISGDSVSSNSAAWNWIRQSPSRGLEWLGRTYYRSKWYNDYAVSVKSRITINPDTSKNQFSLQLNSVTPEDTAVYYCAREESSSGWYEGNWFDPWGQGTLVTV

SEQ ID NO: 712 - protein, 125 aa, synthetic construct; identical to SEQ ID NO: 710
  REGION 1..125: note = source = /note="Description of Artificial Sequence: Synthetic polypeptide"

SEQ ID NO: 713 - protein, 118 aa, synthetic construct
  REGION 1..118: note = source = /note="Description of Artificial Sequence: Synthetic polypeptide"
QVQLQESGPGLVKPSETLSLTCTVSGGSISSSSYYWGWIRQPPGKGLEWIGSIYYSGSTYYNPSLKSRVTISVDTSKNQFSLKLSSVTAADTAVYYCARGRMDTAMAQIWGQGTMVTV

SEQ ID NO: 714 - protein, 115 aa, synthetic construct
  REGION 1..115: note = source = /note="Description of Artificial Sequence: Synthetic polypeptide"
QVQLVQSGAEVKKPGASVKVSCKASGYTFTSYYMHWVRQAPGQGLEWMGIINPSGGSTSYAQKFQGRVTMTRDTSTSTVYMELSSLRSEDTAVYYCARDLDVSLDIWGQGTMVTV

SEQ ID NO: 715 - protein, 121 aa, synthetic construct
  REGION 1..121: note = source = /note="Description of Artificial Sequence: Synthetic polypeptide"
EVQLVESGGGLVQPGGSLRLSCAASGFTFSSYAMHWVRQAPGKGLEYVSAISSNGGSTYYANSVKDRFTISRDNSKNTLYLQMGSLRAEDMAVYYCARVHSSGYYHPGPNDYWGQGTLVTV

SEQ ID NO: 716 - protein, 116 aa, synthetic construct
  REGION 1..116: note = source = /note="Description of Artificial Sequence: Synthetic polypeptide"
EVQLVESGAEVKKPGASVKVSCKASGYTFTSYYMHWVRQAPGQGLEWMGIINPSGGSTSYAQKFQGRVTMTRDTSTSTAYMELSSLRSEDTAVYYCAREAGVVAVDYWGQGTLVTV

SEQ ID NO: 717 - protein, 120 aa, synthetic construct
  REGION 1..120: note = source = /note="Description of Artificial Sequence: Synthetic polypeptide"
QVQLVQSGGGVVQPGRSLRLSCAASGFTFSSYAMSWVRQAPGKGLEWVSAISGSGGSTYYADSVKGRFTISRDNSKNTLYLQMNSLRAEDTAVYYCAKEPLFGVVEEDVDYWGQGTLVTV

SEQ ID NO: 718 - protein, 118 aa, synthetic construct
  REGION 1..118: note = source = /note="Description of Artificial Sequence: Synthetic polypeptide"
QVQLVQSGAEVKKPGASVKVSCKASGYTFTSYYMHWVRQAPGQGLEWMGIINPSGGSTSYAQKFQGRVTMTRDTSTSTVYMELSSLRSEDTAVYYCARGSGSLGDAFDIWGQGTMVTV

SEQ ID NO: 719 - protein, 119 aa, synthetic construct
  REGION 1..119: note = source = /note="Description of Artificial Sequence: Synthetic polypeptide"
QVQLVQSGAEVKKPGASVKVSCKASGYTFTSYYMHWVRQAPGQGLEWMGIINPSGGSTSYAQKFQGRVTMTRDTSTSTVYMELSSLRSEDTAVYYCARDGFGELSGAFDIWGQGTMVTV

SEQ ID NO: 720 - protein, 120 aa, synthetic construct
  REGION 1..120: note = source = /note="Description of Artificial Sequence: Synthetic polypeptide"
EVQLVESGAEVKKPGASVKVSCKASGYTFTSYYMHWVRQAPGQGLEWMGIINPSGGSTSYAQKFQGRVTMTRDTSTSTVYMELSSLRSEDTAVYYCARGPIGCSGGSCLDYWGQGTLVTV

SEQ ID NO: 721 - protein, 119 aa, synthetic construct
  REGION 1..119: note = source = /note="Description of Artificial Sequence: Synthetic polypeptide"
QVQLVQSGAEVKKPGASVKVSCKASGYTFTSYYMHWVRQAPGQGLEWMGIINPSGGSTSYAQKFQGRVTMTRDTSTSTVYMELSSLRSEDTAVYYCARGSYGDYGDAFDIWGQGTTVTV

SEQ ID NO: 722 - protein, 116 aa, synthetic construct
  REGION 1..116: note = source = /note="Description of Artificial Sequence: Synthetic polypeptide"
EVQLVESGAEVKKPGSSVKVSCKASGGTFSSYAISWVRQAPGQGLEWMGGIIPIFGTANYAQKFQGRVTITADESTSTAYMELSSLRSEDTAVYYCARDHKVVRFGYWGQGTLVTV

SEQ ID NO: 723 - protein, 114 aa, synthetic construct
  REGION 1..114: note = source = /note="Description of Artificial Sequence: Synthetic polypeptide"
QVQLVQSGAEVKKPGASVKVSCKASGYTFTSYYMHWVRQAPGQGLEWMGIINPSGGSTSYAQKFQGRVTMTRDTSTSTVYMELSSLRSEDTAVYYCARGDYYMDVWGKGTTVTV

SEQ ID NO: 724 - protein, 122 aa, synthetic construct
  REGION 1..122: note = source = /note="Description of Artificial Sequence: Synthetic polypeptide"
EVQLVESGGGLVQPGGSLRLSCAASGFTFSSYAMSWVRQAPGKGLEWVSYISSSSSTIYYADSVKGRFTISRDNAKNSLYLQMNSLRAEDTAVYYCARDGPIRYFDHSKAFDIWGQGTMVTV

SEQ ID NO: 725 - protein, 117 aa, synthetic construct
  REGION 1..117: note = source = /note="Description of Artificial Sequence: Synthetic polypeptide"
QVQLVQSGAEVKKPGASVKVSCKASGYTFTSYYMHWVRQAPGQGLEWMGIINPSGGSTSYAQKFQGRVTMTRDTSISTAYMELSRLRSDDTAVYYCAREMDDSSGPDYWGQGTLVTV

SEQ ID NO: 726 - protein, 121 aa, synthetic construct
  REGION 1..121: note = source = /note="Description of Artificial Sequence: Synthetic polypeptide"
EVQLVESGAEVKKPGESLKISCKGSGYSFTGSWIGWGRQMPGKGLEWMGIIYPGDSDTRYSPSFQGQVTISADKSISTAYLQWSSLKASDTAMYYCARGFLRGGDCCGALDIWGQGTMVTV

SEQ ID NO: 727 - protein, 119 aa, synthetic construct
  REGION 1..119: note = source = /note="Description of Artificial Sequence: Synthetic polypeptide"
QVQLQESGPGLVKPSETLSLTCSVSGGSINSYYWSWIRQAPGKGLEWIAFTSHSGNVKYNPSLTGRVTIAVDTSKNQFYLEVTSVTAADTAVYFCARGLDPLFAYDAFEIWGLGTMVTV

SEQ ID NO: 728 - protein, 117 aa, synthetic construct
  REGION 1..117: note = source = /note="Description of Artificial Sequence: Synthetic polypeptide"
EVQLVESGGGLVKPGGSLRLSCAASGFTFSDYYMSWIRQAPGKGLEWVSYISSSGSTIYYADSVKGRFTISRDNAKNSLYLQMNSLRAEDTAVYYCARDDFWSGSVDYWGQGTLVTV

SEQ ID NO: 729 - protein, 120 aa, synthetic construct
  REGION 1..120: note = source = /note="Description of Artificial Sequence: Synthetic polypeptide"
QVQLVQSGAEVKKPGASVKVSCKASGYTFTSYYMHWVRQAPGQGLEWMGIINPSGGSTSYAQKFQGRVTMTRDTSTSTVYMELSSLRSEDTAVYYCAREDDSSGYTSPFDYWGQGTLVTV

SEQ ID NO: 730 - protein, 123 aa, synthetic construct
  REGION 1..123: note = source = /note="Description of Artificial Sequence: Synthetic polypeptide"
EVQLVESGAEVKKPGASVKVSCKASGYTFTGYYMHWVRQAPGQGLEWMGWINPNSGGTNYAQKFQGRVTMTRDTSISTAYMELSRLRSDDTAVYYCAREPASSSWYGYYYYMDVWGKGTLVTV

SEQ ID NO: 731 - protein, 120 aa, synthetic construct
  REGION 1..120: note = source = /note="Description of Artificial Sequence: Synthetic polypeptide"
QVQLVQSGAEVKKPGASVKVSCKASGYTFTSYDINWVRQATGQGLEWMGWMNPNSGNTGYAQKFQGRVTMTRNTSISTAYMELSSLRSEDTAVYYCARGDSNYWSYYGMDVWGQGTLVTV

SEQ ID NO: 732 - protein, 116 aa, synthetic construct
  REGION 1..116: note = source = /note="Description of Artificial Sequence: Synthetic polypeptide"
QVQLVQSGAEVKKPGASVKVSCKASGYTFTSYGISWVRQAPGQGLEWMGWISAYNGNTNYAQKLQGRVTMTTDTSTSTAYMELRSLRSDDTAVYYCASFSSSDSYDYWGQGTLVTV

SEQ ID NO: 733 - protein, 125 aa, synthetic construct
  REGION 1..125: note = source = /note="Description of Artificial Sequence: Synthetic polypeptide"
QVNLRESGPALVKPTQTLTLTCTFSGFSLNTFGMSVSWIRQPPGKALEWLALIDWDDDKYYSTSLRTRLTISKDTAKNQVVLRMTNMDPMDTATYYCARIYGGDRTNTQAPYFFDLWGQGTLVTV

SEQ ID NO: 734 - protein, 120 aa, synthetic construct
  REGION 1..120: note = source = /note="Description of Artificial Sequence: Synthetic polypeptide"
QVQLQESGPGLVKPSGTLSLTCAVSGASITSRHWWNWVRHSPGKGLEWIGQIYHSGTTTYNPSLGSRVTISVDKSKNQISLELRSVTAADTATYYCVRDYLELATYYGMDVWGQGTTVTV

SEQ ID NO: 735 - protein, 122 aa, synthetic construct
  REGION 1..122: note = source = /note="Description of Artificial Sequence: Synthetic polypeptide"
QVQLVQSGAEVKKPGASVKVSCKASGYTFTSYYMHWVRQAPGQGLEWMGIINPSGGSTSYAQKFQGRVTMTRDTSTSTVYMELSSLRSEDTAVYYCARDLAAAGNYYYYGMDVWGQGTTVTV

SEQ ID NO: 736 - protein, 120 aa, synthetic construct
  REGION 1..120: note = source = /note="Description of Artificial Sequence: Synthetic polypeptide"
QVQLVQSGAEVKKPGASVKVSCKASGYTFTSYYMHWVRQAPGQGLEWMGIINPSGGSTSYAQKFQGRVTMTRDTSTSTVYMELSSLRSEDTAVYYCARDDDFWSGSGAFDIWGQGTTVTV

SEQ ID NO: 737 - protein, 121 aa, synthetic construct
  REGION 1..121: note = source = /note="Description of Artificial Sequence: Synthetic polypeptide"
QVQLVQSGAEVKKPGASVKVSCKASGYTFTSYYMHWVRQAPGQGLEWMGIINPSGGSTSYAQKFQGRVTMTRDTSTSTVYMELSSLRSEDTAVYYCARPEGVSYYDSSVLDYWGQGTLVTV

SEQ ID NO: 738 - protein, 119 aa, synthetic construct
  REGION 1..119: note = source = /note="Description of Artificial Sequence: Synthetic polypeptide"
QVQLVQSGAEVKKPGASVKVSCKASGYTFTSYYMHWVRQAPGQGLEWMGIINPSGGSTSYAQKFQGRVTMTRDTSTSTVYMELSSLRAEDTAVYYCARGGYGDYLDAFDIWGQGTTVTV

SEQ ID NO: 739 - protein, 107 aa, synthetic construct
  REGION 1..107: note = source = /note="Description of Artificial Sequence: Synthetic polypeptide"
DIQMTQSPSSLSASVGDRVTITCRASQTIWSYLNWYQQRPGKAPNLLIYAASSLQSGVPSRFSGRGSGTDFTLTISSLQAEDFATYYCQQSYSIPQTFGQGTKLEIK

SEQ ID NO: 740 - protein, 110 aa, synthetic construct
  REGION 1..110: note = source = /note="Description of Artificial Sequence: Synthetic polypeptide"
SYVLTQPPSASGTPGQRVTISCSGSSSNIGSNYVYWYQQLPGTAPKLLIYRNNQRPSGVPDRFSGSKSGTSASLAISGLRSEDEADYYCAAWDDSLSGYVFGTGTKLTVL

SEQ ID NO: 741 - protein, 111 aa, synthetic construct
  REGION 1..111: note = source = /note="Description of Artificial Sequence: Synthetic polypeptide"
QSALTQPASVSGSPGQSITISCTGTSSDVGGYNYVSWYQQHPGKAPKLMIYDVSKRPSGVSNRFSGSKSGNTASLTISGLQAEDEADYYCSSYTSSSLNHVFGTGTKVTVL

SEQ ID NO: 742 - protein, 111 aa, synthetic construct
  REGION 1..111: note = source = /note="Description of Artificial Sequence: Synthetic polypeptide"
QSALTQPASVSGSPGQSITISCTGTSSDVGGYNYVSWYQQHPGKAPKLMIYDVSNRPSGVSNRFSGSKSGNTASLTISGLQAEDEADYYCSSYTSSSTPYVFGTGTQLTVL

SEQ ID NO: 743 - protein, 109 aa, synthetic construct
  REGION 1..109: note = source = /note="Description of Artificial Sequence: Synthetic polypeptide"
SSELTQDPAVSVALGQTVRITCQGDSLRSYYASWYQQKPGQAPVLVIYGKNNRPSGIPDRFSGSSSGNTASLTITGAQAEDEADYYCNSRDSSGNHLWVFGGGTKLTVL

SEQ ID NO: 744 - protein, 106 aa, synthetic construct
  REGION 1..106: note = source = /note="Description of Artificial Sequence: Synthetic polypeptide"
SSELTQDPAVSVALGQTVRITCQGDSLRSYYASWYQQKPGQAPVLVIYGKNNRPSGIPDRFSGSSSGNTASLTITGAQAEDEADYYCNSRDSSGWVFGGGTKLTVL

SEQ ID NO: 745 - protein, 111 aa, synthetic construct
  REGION 1..111: note = source = /note="Description of Artificial Sequence: Synthetic polypeptide"
QSALTQPASVSGSPGQSITISCTGTSSDVGGYNYVSWYQQHPGKAPKLMIYDVSNRPSGVSNRFSGSKSGNTASLTISGLQAEDEADYYCSSYTSSSTLYVFGTGTKVTVL

SEQ ID NO: 746 - protein, 110 aa, synthetic construct
  REGION 1..110: note = source = /note="Description of Artificial Sequence: Synthetic polypeptide"
QSALTQPGSVSGSPGQSITISCTGTSSDVGGYNYVSWYQQHPGKAPKLIIYDVSSRPSGVSNRFSGSQSGNTASLTISGLQAEDEADYSCSSYAGSNTLVFGTGTKVTVL

SEQ ID NO: 747 - protein, 111 aa, synthetic construct
  REGION 1..111: note = source = /note="Description of Artificial Sequence: Synthetic polypeptide"
NFMLTQPHSVSESPGKTVTISCTRSSGSIASNYVQWYQQRPGSSPTTVIYEDNQRPSGVPDRFSGSIDSSSNSASLTISGLKTEDEADYYCQSYDSSNPWVFGGGTKLTVL

SEQ ID NO: 748 - protein, 110 aa, synthetic construct
  REGION 1..110: note = source = /note="Description of Artificial Sequence: Synthetic polypeptide"
SYVLTQPPSASGTPGQRVTISCSGSSSNIGSNYVYWYQQLPGTAPKLLIYRNNQRPSGVPDRFSGSKSGTSASLAISGLRSEDEADYYCAAWDDSLSGPVFGGGTKLTVL

SEQ ID NO: 749 - protein, 112 aa, synthetic construct
  REGION 1..112: note = source = /note="Description of Artificial Sequence: Synthetic polypeptide"
QSALTQPASVSGSPGQSITISCTGTSSDVGGYNYVSWYQQHPGKAPKLMIYDVSNRPSGVSNRFSGSKSGNTASLTISGLQAEDEADYYCSSYTSSSTLVYVFGTGTKVTVL

SEQ ID NO: 750 - protein, 107 aa, synthetic construct
  REGION 1..107: note = source = /note="Description of Artificial Sequence: Synthetic polypeptide"
SSELTQDPAVSVALGQTVRITCQGDSLRSYYASWYQQKPGQAPVLVIYGKNHRPSGIPDRFSGSSSGDTDSLTITGAQAEDEADYYCHSRDSSGNHLFGGGTKLTVL

SEQ ID NO: 751 - protein, 111 aa, synthetic construct; identical to SEQ ID NO: 689
  REGION 1..111: note = source = /note="Description of Artificial Sequence: Synthetic polypeptide"

SEQ ID NO: 752 - protein, 110 aa, synthetic construct
  REGION 1..110: note = source = /note="Description of Artificial Sequence: Synthetic polypeptide"
NFMLTQPHSVSESPGKTVTIPCTGSSGSFASSYVQWYQQRPGSAPATVIYEDNQRPSGVPDRFSGSVDSSSNSASLTISGLKTEDEAVYYCQSYDGATWVFGGGTKLTVL

SEQ ID NO: 753 - protein, 110 aa, synthetic construct
  REGION 1..110: note = source = /note="Description of Artificial Sequence: Synthetic polypeptide"
QSALTQPASVSGSPGQSITISCSGTSSDVGGYNSVSWYQQYPGKAPKLMIYDVNNRPSGVSSRFSGSKSGNTASLTISGLQAEDEADYYCSSYTSSSTLFFGAGTKVTVL

SEQ ID NO: 754 - protein, 109 aa, synthetic construct
  REGION 1..109: note = source = /note="Description of Artificial Sequence: Synthetic polypeptide"
SSELTQDPAVSVALGQTVRITCQGDSLRTYYATWYQQKPGQAPVLVFYDENNRPSGIPDRFSGSSSGNTASLTITGTQAEDEADYYCSSRDSSGNPSCVFGGGTKLTVL

SEQ ID NO: 755 - protein, 110 aa, synthetic construct
  REGION 1..110: note = source = /note="Description of Artificial Sequence: Synthetic polypeptide"
QSALTQPASVSGSPGQSITISCTGTSSDVGGYNYVSWYQQHPGKAPKLMIYDVSNRPSGVSNRFSGSKSGNTASLTISGLQAEDEADYYCSSYTSSSTWVFGGGTKLTVL

SEQ ID NO: 756 - protein, 113 aa, synthetic construct
  REGION 1..113: note = source = /note="Description of Artificial Sequence: Synthetic polypeptide"
DVVMTQSPLSLPVTPGEPASISCRSSQSLLAGNGHNYLDWYLQKPGQSPQLLIYLGSNRASGVPDRFSGSGSGTDFTLKISRVEAEDVGVYYCMQALQNPLTFGGGTKLEIKR

SEQ ID NO: 757 - protein, 110 aa, synthetic construct
  REGION 1..110: note = source = /note="Description of Artificial Sequence: Synthetic polypeptide"
QSALTQPASVSGSPGQSITISCTGSSSDVGGYNYVSWYQQHPGKAPKLMIYEVSNRPSGVSNRFSGSKSGNTASLTISGLQAEDEADYYCSSYTSSSTLVFGTGTKVTVL

SEQ ID NO: 758 - protein, 110 aa, synthetic construct
  REGION 1..110: note = source = /note="Description of Artificial Sequence: Synthetic polypeptide"
QSALTQPASVSGSPGQSITISCTGTSSDVGGYNYVSWYQQHPGKAPKLMIYDVSNRPSGVSNRFSGSKSGNTASLTISGLQAEDEADYYCSSYASSSTLVFGGGTKVTVL

SEQ ID NO: 759 - protein, 110 aa, synthetic construct
  REGION 1..110: note = source = /note="Description of Artificial Sequence: Synthetic polypeptide"
QSALTQPAYVSGSPGQSITISCTGTNSDVGRYNYVSWYQQHPGKAPKLMIYEVSYRPSGVSNRFSGSKSGNTASLTISGLQAEDEADYYCSSYTTSSTLDFGTGTKVTVL

SEQ ID NO: 760 - protein, 110 aa, synthetic construct
  REGION 1..110: note = source = /note="Description of Artificial Sequence: Synthetic polypeptide"
QSALTQPASVSGSPGQSITISCTGTSSDVGGYKYVSWYQQHPGKAPKLMIYDVSNRPSGVSNRFSGSKSGNTASLTISGLQAEDEADYYCSSYTSSSTLVFGGGTKLTVL

SEQ ID NO: 761 - protein, 111 aa, synthetic construct
  REGION 1..111: note = source = /note="Description of Artificial Sequence: Synthetic polypeptide"
HVILTQPPSASASLGASVKLTCTLSSGHSSYAIAWHQQQPEKGPRYLMKVNSDGSLSKGDGIPDRFSGSTSGAERYLTISSLQSEDEADYYCQTWGSGMAIFGGGTKLTVL

SEQ ID NO: 762 - protein, 110 aa, synthetic construct
  REGION 1..110: note = source = /note="Description of Artificial Sequence: Synthetic polypeptide"
QSALTQPASASGSPGQSVTISCTGTSSDVGGYNYVSWYQQHPGKAPKLMIYEVSKRPSGVPDRFSGSKSGNTASLTISGLQAEDEADYYCSSYTSSGTLVFGGGTKLTVL

SEQ ID NO: 763 - protein, 108 aa, synthetic construct
  REGION 1..108: note = source = /note="Description of Artificial Sequence: Synthetic polypeptide"
SSELTQDPAVSVALGQTVRITCQGDSLRSYYASWYQQKPGQAPVLVIYGKNNRPSGIPDRFSGSSSGNTASLTITGAQAEDEADYYRNSRDSSGNPYVFGTGTKVTVL

SEQ ID NO: 764 - protein, 110 aa, synthetic construct
  REGION 1..110: note = source = /note="Description of Artificial Sequence: Synthetic polypeptide"
QSALTQPASVSGSPGQSITISCTGTSSDVGGYNYVSWYQQHPGKAPKLMIYEVSNRPSGVSNRFSGSKSGNTASLTISGLQAEDEADYYCSSYTSSSTLVFGTGTKLTVL

SEQ ID NO: 765 - protein, 114 aa, synthetic construct
  REGION 1..114: note = source = /note="Description of Artificial Sequence: Synthetic polypeptide"
DIVMTQSPLSLPVTPGEPASISCRSSQSLLHSNGYNYLDWYLQKPGQSPQLLIYLGSNRASGVPDRFSGSGSGTDFTLKISRVEAEDVGVYYCMQALQTPPWTFGQGTKLEIKR

SEQ ID NO: 766 - protein, 114 aa, synthetic construct
  REGION 1..114: note = source = /note="Description of Artificial Sequence: Synthetic polypeptide"
EIVLTQSPLSLPVTPGEPASISCRSSQSLLHSNGYNYLDWYLQKPGQSPQLLIYLGSNRASGVPDRFSGSGSGTDFTLKISRVEAEDVGVYYCMQVLQTPPLTFGGGTKVDIKR

SEQ ID NO: 767 - protein, 108 aa, synthetic construct
  REGION 1..108: note = source = /note="Description of Artificial Sequence: Synthetic polypeptide"
SYVLTQPPSVSVAPGKTATITCGGTNIGSKNVHWYQQKPGQAPVLAIYYDSDRPSGIPERFSGSNSGNTATLTISRVEAGDEADYFCQVWDSSSDHWVFGGGTKLTVL

SEQ ID NO: 768 - protein, 108 aa, synthetic construct
  REGION 1..108: note = source = /note="Description of Artificial Sequence: Synthetic polypeptide"
SYELTQPPSVSVAPGETASIACGGHNIRSKNVHWYQQKPGQAPVLVISYDGDRPSGIPERFSGSNLGSTATLTISRVEAGDEADYYCQVWDSDSDHYVFGTGTKVTVL

SEQ ID NO: 769 - protein, 107 aa, synthetic construct
  REGION 1..107: note = source = /note="Description of Artificial Sequence: Synthetic polypeptide"
DIQMTQSPSSLSASVGDRVTITCRASQSINTYLNWYQQKPGKPPKLLIYAASNLQSGVPSRFSGSGSGTHFTLTISSLQPDDFATYYCQQSYSSLLTFGGGTKLEIK

SEQ ID NO: 770 - protein, 110 aa, synthetic construct
  REGION 1..110: note = source = /note="Description of Artificial Sequence: Synthetic polypeptide"
QSVLTQPRSVSGSPGQSVTISCTGTSSDVGGYNYVSWYQQHPGEAPKLIIYDADKRPSGISNRFSSGKSGNTASLTISGLQVEDEADYYCCSYAGGSTWVFGGGTKVTVL

SEQ ID NO: 771 - protein, 109 aa, synthetic construct
  REGION 1..109: note = source = /note="Description of Artificial Sequence: Synthetic polypeptide"
EIVLTQSPATLSVSPGERATLSCRASQSVTSNLAWYQQKPGQAPRLLIYAASTRATGIPARFSGSGSGTEFTLTISSMQSEDFAVYFCQQYHTWPPLTFGGGTKVEIKT

SEQ ID NO: 772 - protein, 112 aa, synthetic construct
  REGION 1..112: note = source = /note="Description of Artificial Sequence: Synthetic polypeptide"
DVVMTQSPLSLPVTPGEPASISCRSSQSLLHSNGYNYLDWYLQKPGQSPQLLIYLGSNRASGVPDRFSGSGSGTDFTLKISRVEAEDVGVYYCMQALQTPWTFGQGTKLEIK

SEQ ID NO: 773 - protein, 111 aa, synthetic construct
  REGION 1..111: note = source = /note="Description of Artificial Sequence: Synthetic polypeptide"
EIVLTQSPLSLPVTPGEPASISCRSSQSLLYSDGYNYLDWYLQKPGQSPQLLIYLGSNRASGVPDRFSGSGSGTDFTLQISGVETEDVGVYYCMQALQTQSFGQGTKLEIK

SEQ ID NO: 774 - protein, 108 aa, synthetic construct
  REGION 1..108: note = source = /note="Description of Artificial Sequence: Synthetic polypeptide"
SSELTQDPAVSVALGQTARITCQGDSLRSYFTSWYHQKPGQAPVLVIYGNNNRPSGIPDRFSGSSSGNTASLTITGAQAEDEGDYYCDSRDSSGDHLVFGGGTKLTVL

SEQ ID NO: 775 - protein, 109 aa, synthetic construct
  REGION 1..109: note = source = /note="Description of Artificial Sequence: Synthetic polypeptide"
SSELTQDPAVSVALGQTVRITCQGDSLRSYYASWYQQKPGQAPVLVIYGKNNRPSGIPDRFSGSSSGNTASLTITGAQAEDEADYYCNSRDSSGNHPVVFGGGTKLTVL

SEQ ID NO: 776 - protein, 110 aa, synthetic construct
  REGION 1..110: note = source = /note="Description of Artificial Sequence: Synthetic polypeptide"
QSALTQPASVSGSPGQSITISCTGTSSDVGGYKHVSWYQHHPGKAPKLMIYDVSNRPSGVSNRFSGSKSGNTASLTVSGLQAEDEAHYYCVSYRNFNSLVFGTGTKVTVL

SEQ ID NO: 777 - protein, 110 aa, synthetic construct
  REGION 1..110: note = source = /note="Description of Artificial Sequence: Synthetic polypeptide"
QSALTQPASVSGSPGQSITISCTGTSSDVGGYNYVSWYQQHPGKAPKLMIYEVSNRPSGVSNRFSGSKSGNTASLTISGLQAEDEADYYCSSYTSSSTLVFGTGTQLTVL

SEQ ID NO: 778 - protein, 12 aa, synthetic construct
  REGION 1..12: note = source = /note="Description of Artificial Sequence: Synthetic peptide"
RFSLSTYGMSVG

SEQ ID NO: 779 - protein, 10 aa, synthetic construct
  REGION 1..10: note = source = /note="Description of Artificial Sequence: Synthetic peptide"
GFTFSSSGMQ

SEQ ID NO: 780 - protein, 12 aa, synthetic construct
  REGION 1..12: note = source = /note="Description of Artificial Sequence: Synthetic peptide"
GFSLNTHGMGVG

SEQ ID NO: 781 - protein, 12 aa, synthetic construct
  REGION 1..12: note = source = /note="Description of Artificial Sequence: Synthetic peptide"
GFSLSTSGMVVS

SEQ ID NO: 782 - protein, 10 aa, synthetic construct
  REGION 1..10: note = source = /note="Description of Artificial Sequence: Synthetic peptide"
GNTVTGYAMH

SEQ ID NO: 783 - protein, 10 aa, synthetic construct
  REGION 1..10: note = source = /note="Description of Artificial Sequence: Synthetic peptide"
GFTFRDYYMA

SEQ ID NO: 784 - protein, 10 aa, synthetic construct
  REGION 1..10: note = source = /note="Description of Artificial Sequence: Synthetic peptide"
GFTFSSSGMQ

SEQ ID NO: 785 - protein, 10 aa, synthetic construct
  REGION 1..10: note = source = /note="Description of Artificial Sequence: Synthetic peptide"
EYTFTDYAFH

SEQ ID NO: 786 - protein, 10 aa, synthetic construct
  REGION 1..10: note = source = /note="Description of Artificial Sequence: Synthetic peptide"
GFTFSKYGMN

SEQ ID NO: 787 - protein, 12 aa, synthetic construct
  REGION 1..12: note = source = /note="Description of Artificial Sequence: Synthetic peptide"
RFSLSTYGMSVG

SEQ ID NO: 788 - protein, 12 aa, synthetic construct
  REGION 1..12: note = source = /note="Description of Artificial Sequence: Synthetic peptide"
GFSLNTHGMGVG

SEQ ID NO: 789 - protein, 12 aa, synthetic construct
  REGION 1..12: note = source = /note="Description of Artificial Sequence: Synthetic peptide"
GFSLSTSGMVVS

SEQ ID NO: 790 - protein, 10 aa, synthetic construct
  REGION 1..10: note = source = /note="Description of Artificial Sequence: Synthetic peptide"
GNTVTGYAMH

SEQ ID NO: 791 - protein, 17 aa, synthetic construct
  REGION 1..17: note = source = /note="Description of Artificial Sequence: Synthetic peptide"
WINTYSGKPTYADDFKG

SEQ ID NO: 792 - protein, 17 aa, synthetic construct
  REGION 1..17: note = source = /note="Description of Artificial Sequence: Synthetic peptide"
SISSTSIYIYYADTVKG

SEQ ID NO: 793 - protein, 16 aa, synthetic construct
  REGION 1..16: note = source = /note="Description of Artificial Sequence: Synthetic peptide"
SISYEGNPYYGDSVKG

SEQ ID NO: 794 - protein, 16 aa, synthetic construct
  REGION 1..16: note = source = /note="Description of Artificial Sequence: Synthetic peptide"
DIWWDDDKHYNPSLKN

SEQ ID NO: 795 - protein, 17 aa, synthetic construct
  REGION 1..17: note = source = /note="Description of Artificial Sequence: Synthetic peptide"
GIYYDSYKKSYADSVKG

SEQ ID NO: 796 - protein, 16 aa, synthetic construct
  REGION 1..16: note = source = /note="Description of Artificial Sequence: Synthetic peptide"
NIWWDDDKYYNPSLKN

SEQ ID NO: 797 - protein, 16 aa, synthetic construct
  REGION 1..16: note = source = /note="Description of Artificial Sequence: Synthetic peptide"
AIAWDGDKYYNPSLKS

SEQ ID NO: 798 - protein, 17 aa, synthetic construct
  REGION 1..17: note = source = /note="Description of Artificial Sequence: Synthetic peptide"
WINTYSGKPTYADDFKG

SEQ ID NO: 799 - protein, 16 aa, synthetic construct
  REGION 1..16: note = source = /note="Description of Artificial Sequence: Synthetic peptide"
SISYEGNPYYGDSVKG

SEQ ID NO: 800 - protein, 255 aa, synthetic construct
  REGION 1..255: note = source = /note="Description of Artificial Sequence: Synthetic polypeptide"
QIQLVQSGPELKKPGESVKISCKTSEYTFTDYAFHWVKQAPGKGLKWMGWINTYSGKPTYADDFKGRFVFSLEDSARTANLQISNLKNEDTATYFCARGAYYGYRDWFTYWGQGTLVTVSSGGGGSGGGGSGGGGSGGGGSDIVMTQTPSSQAVSAGEKVTMSCKSSQSLLYSENKKNYLAWYQQKPGQSPKLLIYWASTRESGVPDRFIGSGSGTDFTLTISSVQAEDLAVYYCQQYYNFPPWTFGGGTKLELK

SEQ ID NO: 801 - DNA, 765 bp, synthetic construct
  misc_feature 1..765: note = source = /note="Description of Artificial Sequence: Synthetic polynucleotide"
  source 1..765: mol_type = other DNA
caaattcaactggtccagtccggccctgagctgaagaagccgggagaatccgtgaagatctcctgcaagacctcggagtacaccttcactgactacgccttccactgggtcaagcaggcacctgggaaaggcctgaagtggatgggctggatcaacacttactcggggaagccaacctacgccgatgatttcaagggaagattcgtgtttagcctggaggactccgcccggacagctaacctccaaatctccaaccttaagaacgaggacactgcgacctacttctgcgcgcggggagcctattacggttatcgcgactggttcacctactggggacagggcaccctcgtgaccgtgtcctccggcggtggaggctcaggggggggcggctcgggagggggtggaagcggaggaggaggctccgatattgtgatgacccagaccccgtcgagccaggcagtgtccgctggagaaaaggtcaccatgtcctgcaagagctcacagtccctgttgtactccgaaaacaagaagaattacctggcctggtaccagcagaagcccggacagtcccctaaactgctgatctactgggcctcgactagggaatctggcgtgcccgaccgctttatcggaagcggttcagggactgacttcaccctgaccattagcagcgtgcaggccgaggacctggcggtgtactactgtcaacagtactacaacttcccgccctggactttcggcggtggaacgaagctcgaactcaag

SEQ ID NO: 802 - DNA, 858 bp, synthetic construct
  misc_feature 1..858: note = source = /note="Description of Artificial Sequence: Synthetic polynucleotide"
  source 1..858: mol_type = other DNA
atggccctccctgtcaccgccctgctgcttccgctggctcttctgctccacgccgctcggccccaaattcaactggtccagtccggccctgagctgaagaagccgggagaatccgtgaagatctcctgcaagacctcggagtacaccttcactgactacgccttccactgggtcaagcaggcacctgggaaaggcctgaagtggatgggctggatcaacacttactcggggaagccaacctacgccgatgatttcaagggaagattcgtgtttagcctggaggactccgcccggacagctaacctccaaatctccaaccttaagaacgaggacactgcgacctacttctgcgcgcggggagcctattacggttatcgcgactggttcacctactggggacagggcaccctcgtgaccgtgtcctccggcggtggaggctcaggggggggcggctcgggagggggtggaagcggaggaggaggctccgatattgtgatgacccagaccccgtcgagccaggcagtgtccgctggagaaaaggtcaccatgtcctgcaagagctcacagtccctgttgtactccgaaaacaagaagaattacctggcctggtaccagcagaagcccggacagtcccctaaactgctgatctactgggcctcgactagggaatctggcgtgcccgaccgctttatcggaagcggttcagggactgacttcaccctgaccattagcagcgtgcaggccgaggacctggcggtgtactactgtcaacagtactacaacttcccgccctggactttcggcggtggaacgaagctcgaactcaagggatcgcaccaccatcaccatcatcatcac

SEQ ID NO: 803 - protein, 286 aa, synthetic construct
  REGION 1..286: note = source = /note="Description of Artificial Sequence: Synthetic polypeptide"
MALPVTALLLPLALLLHAARPQIQLVQSGPELKKPGESVKISCKTSEYTFTDYAFHWVKQAPGKGLKWMGWINTYSGKPTYADDFKGRFVFSLEDSARTANLQISNLKNEDTATYFCARGAYYGYRDWFTYWGQGTLVTVSSGGGGSGGGGSGGGGSGGGGSDIVMTQTPSSQAVSAGEKVTMSCKSSQSLLYSENKKNYLAWYQQKPGQSPKLLIYWASTRESGVPDRFIGSGSGTDFTLTISSVQAEDLAVYYCQQYYNFPPWTFGGGTKLELKGSHHHHHHHH

SEQ ID NO: 804 - DNA, 1497 bp, synthetic construct
  misc_feature 1..1497: note = source = /note="Description of Artificial Sequence: Synthetic polynucleotide"
  source 1..1497: mol_type = other DNA
atggccctccctgtcaccgccctgctgcttccgctggctcttctgctccacgccgctcggccccaaattcaactggtccagtccggccctgagctgaagaagccgggagaatccgtgaagatctcctgcaagacctcggagtacaccttcactgactacgccttccactgggtcaagcaggcacctgggaaaggcctgaagtggatgggctggatcaacacttactcggggaagccaacctacgccgatgatttcaagggaagattcgtgtttagcctggaggactccgcccggacagctaacctccaaatctccaaccttaagaacgaggacactgcgacctacttctgcgcgcggggagcctattacggttatcgcgactggttcacctactggggacagggcaccctcgtgaccgtgtcctccggcggtggaggctcaggggggggcggctcgggagggggtggaagcggaggaggaggctccgatattgtgatgacccagaccccgtcgagccaggcagtgtccgctggagaaaaggtcaccatgtcctgcaagagctcacagtccctgttgtactccgaaaacaagaagaattacctggcctggtaccagcagaagcccggacagtcccctaaactgctgatctactgggcctcgactagggaatctggcgtgcccgaccgctttatcggaagcggttcagggactgacttcaccctgaccattagcagcgtgcaggccgaggacctggcggtgtactactgtcaacagtactacaacttcccgccctggactttcggcggtggaacgaagctcgaactcaagaccactaccccagcaccgaggccacccaccccggctcctaccatcgcctcccagcctctgtccctgcgtccggaggcatgtagacccgcagctggtggggccgtgcatacccggggtcttgacttcgcctgcgatatctacatttgggcccctctggctggtacttgcggggtcctgctgctttcactcgtgatcactctttactgtaagcgcggtcggaagaagctgctgtacatctttaagcaacccttcatgaggcctgtgcagactactcaagaggaggacggctgttcatgccggttcccagaggaggaggaaggcggctgcgaactgcgcgtgaaattcagccgcagcgcagatgctccagcctacaagcaggggcagaaccagctctacaacgaactcaatcttggtcggagagaggagtacgacgtgctggacaagcggagaggacgggacccagaaatgggcgggaagccgcgcagaaagaatccccaagagggcctgtacaacgagctccaaaaggataagatggcagaagcctatagcgagattggtatgaaaggggaacgcagaagaggcaaaggccacgacggactgtaccagggactcagcaccgccaccaaggacacctatgacgctcttcacatgcaggccctgccgcctcgg

SEQ ID NO: 805 - protein, 499 aa, synthetic construct
  REGION 1..499: note = source = /note="Description of Artificial Sequence: Synthetic polypeptide"
MALPVTALLLPLALLLHAARPQIQLVQSGPELKKPGESVKISCKTSEYTFTDYAFHWVKQAPGKGLKWMGWINTYSGKPTYADDFKGRFVFSLEDSARTANLQISNLKNEDTATYFCARGAYYGYRDWFTYWGQGTLVTVSSGGGGSGGGGSGGGGSGGGGSDIVMTQTPSSQAVSAGEKVTMSCKSSQSLLYSENKKNYLAWYQQKPGQSPKLLIYWASTRESGVPDRFIGSGSGTDFTLTISSVQAEDLAVYYCQQYYNFPPWTFGGGTKLELKTTTPAPRPPTPAPTIASQPLSLRPEACRPAAGGAVHTRGLDFACDIYIWAPLAGTCGVLLLSLVITLYCKRGRKKLLYIFKQPFMRPVQTTQEEDGCSCRFPEEEEGGCELRVKFSRSADAPAYKQGQNQLYNELNLGRREEYDVLDKRRGRDPEMGGKPRRKNPQEGLYNELQKDKMAEAYSEIGMKGERRRGKGHDGLYQGLSTATKDTYDALHMQALPPR

SEQ ID NO: 806 - protein, 248 aa, synthetic construct
  REGION 1..248: note = source = /note="Description of Artificial Sequence: Synthetic polypeptide"
EVQLVESGGGLVQPGRSLKLSCLASGFTFSKYGMNWIRQAPGKGLEWVASISSTSIYIYYADTVKGRFTISRENAKNTLYLQMTSLRSEDTALYYCARHDYSSYSYWGQGVMVTVSSGGGGSGGGGSGGGGSGGGGSQVVLTQPKSVSTSLESTVKLSCKINSGNIGSYFIHWYQQHEGRSPTTMIYRDDKRPHGVPDRFSGSIDSSSNSAFLTINNVQTEDEAIYFCHSYDSGINIVFGGGTKLTVL

SEQ ID NO: 807 - DNA, 744 bp, synthetic construct
  misc_feature 1..744: note = source = /note="Description of Artificial Sequence: Synthetic polynucleotide"
  source 1..744: mol_type = other DNA
gaggtgcagctcgtcgaatccggtggaggactggtgcagccaggaagatccctgaagctgtcctgtctcgcctcgggcttcactttctccaaatacggcatgaattggattcgccaggcacccggaaaggggctggaatgggtggccagcatcagctcgactagcatctacatctactatgccgataccgtcaagggccgcttcactatctcccgcgagaacgctaagaacaccctttacttgcaaatgacctccctgaggtccgaagataccgccctgtactattgcgcccggcacgactactcatcctactcctactggggacagggagtcatggtgaccgtgtcctccggcggtggaggctcaggggggggcggctcgggagggggtggaagcggaggaggaggctcccaagtcgtgctgacgcaacccaagtccgtgagcaccagcctggagagcaccgtgaagctcagctgcaagattaactcgggcaacattgggtcctacttcatccattggtaccagcagcacgaaggacggtcccctaccactatgatctaccgggacgacaagcggccgcacggagtgccggacagattctcgggttcaatcgattcctcatctaactcggcgtttctcaccatcaacaacgtgcagaccgaggacgaagcgatctacttctgccactcctacgactcgggtattaacattgtgttcggcggcgggactaagctgacagtgctg

SEQ ID NO: 808 - DNA, 837 bp, synthetic construct
  misc_feature 1..837: note = source = /note="Description of Artificial Sequence: Synthetic polynucleotide"
  source 1..837: mol_type = other DNA
atggccctccctgtcaccgccctgctgcttccgctggctcttctgctccacgccgctcggcccgaggtgcagctcgtcgaatccggtggaggactggtgcagccaggaagatccctgaagctgtcctgtctcgcctcgggcttcactttctccaaatacggcatgaattggattcgccaggcacccggaaaggggctggaatgggtggccagcatcagctcgactagcatctacatctactatgccgataccgtcaagggccgcttcactatctcccgcgagaacgctaagaacaccctttacttgcaaatgacctccctgaggtccgaagataccgccctgtactattgcgcccggcacgactactcatcctactcctactggggacagggagtcatggtgaccgtgtcctccggcggtggaggctcaggggggggcggctcgggagggggtggaagcggaggaggaggctcccaagtcgtgctgacgcaacccaagtccgtgagcaccagcctggagagcaccgtgaagctcagctgcaagattaactcgggcaacattgggtcctacttcatccattggtaccagcagcacgaaggacggtcccctaccactatgatctaccgggacgacaagcggccgcacggagtgccggacagattctcgggttcaatcgattcctcatctaactcggcgtttctcaccatcaacaacgtgcagaccgaggacgaagcgatctacttctgccactcctacgactcgggtattaacattgtgttcggcggcgggactaagctgacagtgctgggatcgcaccaccatcaccatcatcatcac

SEQ ID NO: 809 - protein, 279 aa, synthetic construct
  REGION 1..279: note = source = /note="Description of Artificial Sequence: Synthetic polypeptide"
MALPVTALLLPLALLLHAARPEVQLVESGGGLVQPGRSLKLSCLASGFTFSKYGMNWIRQAPGKGLEWVASISSTSIYIYYADTVKGRFTISRENAKNTLYLQMTSLRSEDTALYYCARHDYSSYSYWGQGVMVTVSSGGGGSGGGGSGGGGSGGGGSQVVLTQPKSVSTSLESTVKLSCKINSGNIGSYFIHWYQQHEGRSPTTMIYRDDKRPHGVPDRFSGSIDSSSNSAFLTINNVQTEDEAIYFCHSYDSGINIVFGGGTKLTVLGSHHHHHHHH

SEQ ID NO: 810 - DNA, 1476 bp, synthetic construct
  misc_feature 1..1476: note = source = /note="Description of Artificial Sequence: Synthetic polynucleotide"
  source 1..1476: mol_type = other DNA
atggccctccctgtcaccgccctgctgcttccgctggctcttctgctccacgccgctcggcccgaggtgcagctcgtcgaatccggtggaggactggtgcagccaggaagatccctgaagctgtcctgtctcgcctcgggcttcactttctccaaatacggcatgaattggattcgccaggcacccggaaaggggctggaatgggtggccagcatcagctcgactagcatctacatctactatgccgataccgtcaagggccgcttcactatctcccgcgagaacgctaagaacaccctttacttgcaaatgacctccctgaggtccgaagataccgccctgtactattgcgcccggcacgactactcatcctactcctactggggacagggagtcatggtgaccgtgtcctccggcggtggaggctcaggggggggcggctcgggagggggtggaagcggaggaggaggctcccaagtcgtgctgacgcaacccaagtccgtgagcaccagcctggagagcaccgtgaagctcagctgcaagattaactcgggcaacattgggtcctacttcatccattggtaccagcagcacgaaggacggtcccctaccactatgatctaccgggacgacaagcggccgcacggagtgccggacagattctcgggttcaatcgattcctcatctaactcggcgtttctcaccatcaacaacgtgcagaccgaggacgaagcgatctacttctgccactcctacgactcgggtattaacattgtgttcggcggcgggactaagctgacagtgctgaccactaccccagcaccgaggccacccaccccggctcctaccatcgcctcccagcctctgtccctgcgtccggaggcatgtagacccgcagctggtggggccgtgcatacccggggtcttgacttcgcctgcgatatctacatttgggcccctctggctggtacttgcggggtcctgctgctttcactcgtgatcactctttactgtaagcgcggtcggaagaagctgctgtacatctttaagcaacccttcatgaggcctgtgcagactactcaagaggaggacggctgttcatgccggttcccagaggaggaggaaggcggctgcgaactgcgcgtgaaattcagccgcagcgcagatgctccagcctacaagcaggggcagaaccagctctacaacgaactcaatcttggtcggagagaggagtacgacgtgctggacaagcggagaggacgggacccagaaatgggcgggaagccgcgcagaaagaatccccaagagggcctgtacaacgagctccaaaaggataagatggcagaagcctatagcgagattggtatgaaaggggaacgcagaagaggcaaaggccacgacggactgtaccagggactcagcaccgccaccaaggacacctatgacgctcttcacatgcaggccctgccgcctcgg

SEQ ID NO: 811 - protein, 492 aa, synthetic construct
  REGION 1..492: note = source = /note="Description of Artificial Sequence: Synthetic polypeptide"
MALPVTALLLPLALLLHAARPEVQLVESGGGLVQPGRSLKLSCLASGFTFSKYGMNWIRQAPGKGLEWVASISSTSIYIYYADTVKGRFTISRENAKNTLYLQMTSLRSEDTALYYCARHDYSSYSYWGQGVMVTVSSGGGGSGGGGSGGGGSGGGGSQVVLTQPKSVSTSLESTVKLSCKINSGNIGSYFIHWYQQHEGRSPTTMIYRDDKRPHGVPDRFSGSIDSSSNSAFLTINNVQTEDEAIYFCHSYDSGINIVFGGGTKLTVLTTTPAPRPPTPAPTIASQPLSLRPEACRPAAGGAVHTRGLDFACDIYIWAPLAGTCGVLLLSLVITLYCKRGRKKLLYIFKQPFMRPVQTTQEEDGCSCRFPEEEEGGCELRVKFSRSADAPAYKQGQNQLYNELNLGRREEYDVLDKRRGRDPEMGGKPRRKNPQEGLYNELQKDKMAEAYSEIGMKGERRRGKGHDGLYQGLSTATKDTYDALHMQALPPR

SEQ ID NO: 812 - protein, 251 aa, synthetic construct
  REGION 1..251: note = source = /note="Description of Artificial Sequence: Synthetic polypeptide"
EVQLVESGGGLVQPGRSLKLSCAASGFTFRDYYMAWVRQAPKKGLEWVASISYEGNPYYGDSVKGRFTISRNNAKSTLYLQMNSLRSEDTATYYCARHDHNNVDWFAYWGQGTLVTVSSGGGGSGGGGSGGGGSGGGGSDIVMTQTPSSQAVSAGEKVTMSCKSSQSLLYSENKKNYLAWYQQKPGQSPKLLIFWASTRESGVPDRFIGSGSGTDFTLTISSVQAEDLAVYYCQQYYNFPTFGSGTKLEIK

SEQ ID NO: 813 - DNA, 753 bp, synthetic construct
  misc_feature 1..753: note = source = /note="Description of Artificial Sequence: Synthetic polynucleotide"
  source 1..753: mol_type = other DNA
gaagtgcagcttgtggagtctggcggcggtctggtgcagccgggaagatccctgaagctgtcatgcgccgcgtccgggtttaccttccgcgattactacatggcctgggtcagacaggcacctaagaaggggctggaatgggtggcatccatctcatatgaaggaaacccgtactacggagactcggtgaaaggccgcttcactatctcacggaacaacgctaagagcacgctgtacttgcaaatgaactccctccggtcggaggacacagccacttactactgtgcccggcacgaccataacaacgtcgattggttcgcctactggggtcaaggaaccctcgtgaccgtgtcctccggcggtggaggctcaggggggggcggctcgggagggggtggaagcggaggaggaggctccgacatcgtgatgactcagactccaagcagccaggccgtgtccgccggagagaaagtcaccatgtcgtgcaagagctcccagtccctgctgtactccgaaaacaagaagaattatctcgcctggtaccagcagaagcctggacagtccccgaagctcctgatcttttgggcgtcgaccagggaatccggcgtgcccgatcgcttcattggctccggttccggcaccgacttcaccctgaccattagcagcgtccaggcggaggacctggctgtgtactactgccaacagtactacaacttccccactttcggatcggggaccaagctggagatcaag

SEQ ID NO: 814 - DNA, 846 bp, synthetic construct
  misc_feature 1..846: note = source = /note="Description of Artificial Sequence: Synthetic polynucleotide"
  source 1..846: mol_type = other DNA
atggccctccctgtcaccgccctgctgcttccgctggctcttctgctccacgccgctcggcccgaagtgcagcttgtggagtctggcggcggtctggtgcagccgggaagatccctgaagctgtcatgcgccgcgtccgggtttaccttccgcgattactacatggcctgggtcagacaggcacctaagaaggggctggaatgggtggcatccatctcatatgaaggaaacccgtactacggagactcggtgaaaggccgcttcactatctcacggaacaacgctaagagcacgctgtacttgcaaatgaactccctccggtcggaggacacagccacttactactgtgcccggcacgaccataacaacgtcgattggttcgcctactggggtcaaggaaccctcgtgaccgtgtcctccggcggtggaggctcaggggggggcggctcgggagggggtggaagcggaggaggaggctccgacatcgtgatgactcagactccaagcagccaggccgtgtccgccggagagaaagtcaccatgtcgtgcaagagctcccagtccctgctgtactccgaaaacaagaagaattatctcgcctggtaccagcagaagcctggacagtccccgaagctcctgatcttttgggcgtcgaccagggaatccggcgtgcccgatcgcttcattggctccggttccggcaccgacttcaccctgaccattagcagcgtccaggcggaggacctggctgtgtactactgccaacagtactacaacttccccactttcggatcggggaccaagctggagatcaagggatcgcaccaccatcaccatcatcatcac

SEQ ID NO: 815 - protein, 282 aa, synthetic construct
  REGION 1..282: note = source = /note="Description of Artificial Sequence: Synthetic polypeptide"
MALPVTALLLPLALLLHAARPEVQLVESGGGLVQPGRSLKLSCAASGFTFRDYYMAWVRQAPKKGLEWVASISYEGNPYYGDSVKGRFTISRNNAKSTLYLQMNSLRSEDTATYYCARHDHNNVDWFAYWGQGTLVTVSSGGGGSGGGGSGGGGSGGGGSDIVMTQTPSSQAVSAGEKVTMSCKSSQSLLYSENKKNYLAWYQQKPGQSPKLLIFWASTRESGVPDRFIGSGSGTDFTLTISSVQAEDLAVYYCQQYYNFPTFGSGTKLEIKGSHHHHHHHH

SEQ ID NO: 816 - DNA, 1485 bp, synthetic construct
  misc_feature 1..1485: note = source = /note="Description of Artificial Sequence: Synthetic polynucleotide"
  source 1..1485: mol_type = other DNA
atggccctccctgtcaccgccctgctgcttccgctggctcttctgctccacgccgctcggcccgaagtgcagcttgtggagtctggcggcggtctggtgcagccgggaagatccctgaagctgtcatgcgccgcgtccgggtttaccttccgcgattactacatggcctgggtcagacaggcacctaagaaggggctggaatgggtggcatccatctcatatgaaggaaacccgtactacggagactcggtgaaaggccgcttcactatctcacggaacaacgctaagagcacgctgtacttgcaaatgaactccctccggtcggaggacacagccacttactactgtgcccggcacgaccataacaacgtcgattggttcgcctactggggtcaaggaaccctcgtgaccgtgtcctccggcggtggaggctcaggggggggcggctcgggagggggtggaagcggaggaggaggctccgacatcgtgatgactcagactccaagcagccaggccgtgtccgccggagagaaagtcaccatgtcgtgcaagagctcccagtccctgctgtactccgaaaacaagaagaattatctcgcctggtaccagcagaagcctggacagtccccgaagctcctgatcttttgggcgtcgaccagggaatccggcgtgcccgatcgcttcattggctccggttccggcaccgacttcaccctgaccattagcagcgtccaggcggaggacctggctgtgtactactgccaacagtactacaacttccccactttcggatcggggaccaagctggagatcaagaccactaccccagcaccgaggccacccaccccggctcctaccatcgcctcccagcctctgtccctgcgtccggaggcatgtagacccgcagctggtggggccgtgcatacccggggtcttgacttcgcctgcgatatctacatttgggcccctctggctggtacttgcggggtcctgctgctttcactcgtgatcactctttactgtaagcgcggtcggaagaagctgctgtacatctttaagcaacccttcatgaggcctgtgcagactactcaagaggaggacggctgttcatgccggttcccagaggaggaggaaggcggctgcgaactgcgcgtgaaattcagccgcagcgcagatgctccagcctacaagcaggggcagaaccagctctacaacgaactcaatcttggtcggagagaggagtacgacgtgctggacaagcggagaggacgggacccagaaatgggcgggaagccgcgcagaaagaatccccaagagggcctgtacaacgagctccaaaaggataagatggcagaagcctatagcgagattggtatgaaaggggaacgcagaagaggcaaaggccacgacggactgtaccagggactcagcaccgccaccaaggacacctatgacgctcttcacatgcaggccctgccgcctcgg

SEQ ID NO: 817 - protein, 495 aa, synthetic construct
  REGION 1..495: note = source = /note="Description of Artificial Sequence: Synthetic polypeptide"
MALPVTALLLPLALLLHAARPEVQLVESGGGLVQPGRSLKLSCAASGFTFRDYYMAWVRQAPKKGLEWVASISYEGNPYYGDSVKGRFTISRNNAKSTLYLQMNSLRSEDTATYYCARHDHNNVDWFAYWGQGTLVTVSSGGGGSGGGGSGGGGSGGGGSDIVMTQTPSSQAVSAGEKVTMSCKSSQSLLYSENKKNYLAWYQQKPGQSPKLLIFWASTRESGVPDRFIGSGSGTDFTLTISSVQAEDLAVYYCQQYYNFPTFGSGTKLEIKTTTPAPRPPTPAPTIASQPLSLRPEACRPAAGGAVHTRGLDFACDIYIWAPLAGTCGVLLLSLVITLYCKRGRKKLLYIFKQPFMRPVQTTQEEDGCSCRFPEEEEGGCELRVKFSRSADAPAYKQGQNQLYNELNLGRREEYDVLDKRRGRDPEMGGKPRRKNPQEGLYNELQKDKMAEAYSEIGMKGERRRGKGHDGLYQGLSTATKDTYDALHMQALPPR

SEQ ID NO: 818 - protein, 251 aa, synthetic construct
  REGION 1..251: note = source = /note="Description of Artificial Sequence: Synthetic polypeptide"
QVTLKESGPGILQPSQTLSLTCTFTRFSLSTYGMSVGWIRQPSGKGLEWLADIWWDDDKHYNPSLKNRLTISKDTSKNQAFLKITNVDTADTATYYCARSSTTDGIVTYVMDVWGQGASVTVSSGGGGSGGGGSGGGGSGGGGSDVQMTQSPSLLSASVGDAVTINCKASQNINRYLNWYQQKLGEGPRLLIYSANSLQTGIPSRFSGSGSGADFTLTITSPQPEDVATYFCLQHNSWPLTFGSGTKLEIK

SEQ ID NO: 819 - DNA, 753 bp, synthetic construct
  misc_feature 1..753: note = source = /note="Description of Artificial Sequence: Synthetic polynucleotide"
  source 1..753: mol_type = other DNA
caagtcacgctgaaggaatcgggccctggaattctgcagccaagccagaccctctcgcttacttgcaccttcacccgcttctcactgtccacttacggaatgtccgtgggatggattcggcagcccagcggaaagggtttggagtggctggccgacatttggtgggatgacgacaagcattacaaccctagcctgaagaatcggctcaccatcagcaaagacacctccaagaaccaggcgttcctgaagatcaccaacgtggataccgccgacactgcaacatactattgtgcccgctcctcaaccaccgatgggatcgtgacctacgtgatggacgtctggggccagggagcttccgtgaccgtgtcctccggcggtggaggctcaggggggggcggctcgggagggggtggaagcggaggaggaggctccgacgtgcagatgactcagtccccgtcgctcctgtccgcctccgtcggcgacgccgtgactattaactgcaaggcgtcccagaacatcaatcggtacctgaactggtaccagcaaaaactgggagaagggccgagacttctcatctactccgccaactccctgcaaactggcatcccgtcgaggttcagcggatcaggctctggtgccgacttcactttgaccatcacgagccctcagcccgaagatgtggccacctacttctgcctccaacacaactcctggcccctgacctttggttcgggcaccaagctggagatcaag

SEQ ID NO: 820 - DNA, 846 bp, synthetic construct
  misc_feature 1..846: note = source = /note="Description of Artificial Sequence: Synthetic polynucleotide"
  source 1..846: mol_type = other DNA
atggccctccctgtcaccgccctgctgcttccgctggctcttctgctccacgccgctcggccccaagtcacgctgaaggaatcgggccctggaattctgcagccaagccagaccctctcgcttacttgcaccttcacccgcttctcactgtccacttacggaatgtccgtgggatggattcggcagcccagcggaaagggtttggagtggctggccgacatttggtgggatgacgacaagcattacaaccctagcctgaagaatcggctcaccatcagcaaagacacctccaagaaccaggcgttcctgaagatcaccaacgtggataccgccgacactgcaacatactattgtgcccgctcctcaaccaccgatgggatcgtgacctacgtgatggacgtctggggccagggagcttccgtgaccgtgtcctccggcggtggaggctcaggggggggcggctcgggagggggtggaagcggaggaggaggctccgacgtgcagatgactcagtccccgtcgctcctgtccgcctccgtcggcgacgccgtgactattaactgcaaggcgtcccagaacatcaatcggtacctgaactggtaccagcaaaaactgggagaagggccgagacttctcatctactccgccaactccctgcaaactggcatcccgtcgaggttcagcggatcaggctctggtgccgacttcactttgaccatcacgagccctcagcccgaagatgtggccacctacttctgcctccaacacaactcctggcccctgacctttggttcgggcaccaagctggagatcaagggatcgcaccaccatcaccatcatcatcac

SEQ ID NO: 821 - protein, 282 aa, synthetic construct
  REGION 1..282: note = source = /note="Description of Artificial Sequence: Synthetic polypeptide"
MALPVTALLLPLALLLHAARPQVTLKESGPGILQPSQTLSLTCTFTRFSLSTYGMSVGWIRQPSGKGLEWLADIWWDDDKHYNPSLKNRLTISKDTSKNQAFLKITNVDTADTATYYCARSSTTDGIVTYVMDVWGQGASVTVSSGGGGSGGGGSGGGGSGGGGSDVQMTQSPSLLSASVGDAVTINCKASQNINRYLNWYQQKLGEGPRLLIYSANSLQTGIPSRFSGSGSGADFTLTITSPQPEDVATYFCLQHNSWPLTFGSGTKLEIKGSHHHHHHHH

SEQ ID NO: 822 - DNA, 1485 bp, synthetic construct
  misc_feature 1..1485: note = source = /note="Description of Artificial Sequence: Synthetic polynucleotide"
  source 1..1485: mol_type = other DNA
atggccctccctgtcaccgccctgctgcttccgctggctcttctgctccacgccgctcggccccaagtcacgctgaaggaatcgggccctggaattctgcagccaagccagaccctctcgcttacttgcaccttcacccgcttctcactgtccacttacggaatgtccgtgggatggattcggcagcccagcggaaagggtttggagtggctggccgacatttggtgggatgacgacaagcattacaaccctagcctgaagaatcggctcaccatcagcaaagacacctccaagaaccaggcgttcctgaagatcaccaacgtggataccgccgacactgcaacatactattgtgcccgctcctcaaccaccgatgggatcgtgacctacgtgatggacgtctggggccagggagcttccgtgaccgtgtcctccggcggtggaggctcaggggggggcggctcgggagggggtggaagcggaggaggaggctccgacgtgcagatgactcagtccccgtcgctcctgtccgcctccgtcggcgacgccgtgactattaactgcaaggcgtcccagaacatcaatcggtacctgaactggtaccagcaaaaactgggagaagggccgagacttctcatctactccgccaactccctgcaaactggcatcccgtcgaggttcagcggatcaggctctggtgccgacttcactttgaccatcacgagccctcagcccgaagatgtggccacctacttctgcctccaacacaactcctggcccctgacctttggttcgggcaccaagctggagatcaagaccactaccccagcaccgaggccacccaccccggctcctaccatcgcctcccagcctctgtccctgcgtccggaggcatgtagacccgcagctggtggggccgtgcatacccggggtcttgacttcgcctgcgatatctacatttgggcccctctggctggtacttgcggggtcctgctgctttcactcgtgatcactctttactgtaagcgcggtcggaagaagctgctgtacatctttaagcaacccttcatgaggcctgtgcagactactcaagaggaggacggctgttcatgccggttcccagaggaggaggaaggcggctgcgaactgcgcgtgaaattcagccgcagcgcagatgctccagcctacaagcaggggcagaaccagctctacaacgaactcaatcttggtcggagagaggagtacgacgtgctggacaagcggagaggacgggacccagaaatgggcgggaagccgcgcagaaagaatccccaagagggcctgtacaacgagctccaaaaggataagatggcagaagcctatagcgagattggtatgaaaggggaacgcagaagaggcaaaggccacgacggactgtaccagggactcagcaccgccaccaaggacacctatgacgctcttcacatgcaggccctgccgcctcgg

SEQ ID NO: 823 - protein, 495 aa, synthetic construct
  REGION 1..495: note = source = /note="Description of Artificial Sequence: Synthetic polypeptide"
MALPVTALLLPLALLLHAARPQVTLKESGPGILQPSQTLSLTCTFTRFSLSTYGMSVGWIRQPSGKGLEWLADIWWDDDKHYNPSLKNRLTISKDTSKNQAFLKITNVDTADTATYYCARSSTTDGIVTYVMDVWGQGASVTVSSGGGGSGGGGSGGGGSGGGGSDVQMTQSPSLLSASVGDAVTINCKASQNINRYLNWYQQKLGEGPRLLIYSANSLQTGIPSRFSGSGSGADFTLTITSPQPEDVATYFCLQHNSWPLTFGSGTKLEIKTTTPAPRPPTPAPTIASQPLSLRPEACRPAAGGAVHTRGLDFACDIYIWAPLAGTCGVLLLSLVITLYCKRGRKKLLYIFKQPFMRPVQTTQEEDGCSCRFPEEEEGGCELRVKFSRSADAPAYKQGQNQLYNELNLGRREEYDVLDKRRGRDPEMGGKPRRKNPQEGLYNELQKDKMAEAYSEIGMKGERRRGKGHDGLYQGLSTATKDTYDALHMQALPPR

SEQ ID NO: 824 - protein, 248 aa, synthetic construct
  REGION 1..248: note = source = /note="Description of Artificial Sequence: Synthetic polypeptide"
EVQLVESGGGLVQPGTSLKLSCVASGFTFSSSGMQWIRQAPKKGLEWISGIYYDSYKKSYADSVKGRFTISRDNSKNTLYLEMNSLRSEDTATYYCAKSAYYGYKDYFDYWGQGVMVTVSSGGGGSGGGGSGGGGSGGGGSDIQMTQSPPSLSASLGDKVTITCQASQNINKYIAWYQQKPGKAPRLLIRYTSTLESGTPSRFSGSGSGRDYSFSISNVESGDVASYYCLQYDDLPYTFGPGTKLELK

SEQ ID NO: 825 - DNA, 744 bp, synthetic construct
  misc_feature 1..744: note = source = /note="Description of Artificial Sequence: Synthetic polynucleotide"
  source 1..744: mol_type = other DNA
gaggtccagcttgtggaatcaggaggcggactcgtccagccgggtactagcctgaagctcagctgtgtggccagcggttttaccttctcgtcctccgggatgcagtggattcggcaggctcccaagaagggactggaatggatctcgggcatctactacgactcgtacaagaagtcctacgccgattccgtgaaaggtcgcttcaccatctcccgggacaacagcaagaacactctgtacctcgagatgaactccttgcgctccgaggataccgcaacctattactgcgccaagtcggcctactacggctacaaggactacttcgactattggggccagggagtgatggtgaccgtgtcctccggcggtggaggctcaggggggggcggctcgggagggggtggaagcggaggaggaggctccgacatccaaatgacacagtcacccccttctctttccgcgagcctgggagataaggtcaccattacgtgccaagcgtcccagaacatcaacaagtacatcgcctggtaccagcagaaaccgggaaaggccccgcggctgctgattagatacacctcgactctggaatccggcactccatcaagattcagcggctccggcagcgggagggactactcgttctccatctccaatgtggagtccggggacgtggccagctactattgcctgcaatacgacgatctgccctacaccttcggacctggaaccaagctggaactcaag

SEQ ID NO: 826 - DNA, 837 bp, synthetic construct
  misc_feature 1..837: note = source = /note="Description of Artificial Sequence: Synthetic polynucleotide"
  source 1..837: mol_type = other DNA
atggccctccctgtcaccgccctgctgcttccgctggctcttctgctccacgccgctcggcccgaggtccagcttgtggaatcaggaggcggactcgtccagccgggtactagcctgaagctcagctgtgtggccagcggttttaccttctcgtcctccgggatgcagtggattcggcaggctcccaagaagggactggaatggatctcgggcatctactacgactcgtacaagaagtcctacgccgattccgtgaaaggtcgcttcaccatctcccgggacaacagcaagaacactctgtacctcgagatgaactccttgcgctccgaggataccgcaacctattactgcgccaagtcggcctactacggctacaaggactacttcgactattggggccagggagtgatggtgaccgtgtcctccggcggtggaggctcaggggggggcggctcgggagggggtggaagcggaggaggaggctccgacatccaaatgacacagtcacccccttctctttccgcgagcctgggagataaggtcaccattacgtgccaagcgtcccagaacatcaacaagtacatcgcctggtaccagcagaaaccgggaaaggccccgcggctgctgattagatacacctcgactctggaatccggcactccatcaagattcagcggctccggcagcgggagggactactcgttctccatctccaatgtggagtccggggacgtggccagctactattgcctgcaatacgacgatctgccctacaccttcggacctggaaccaagctggaactcaagggatcgcaccaccatcaccatcatcatcac

SEQ ID NO: 827 - protein, 279 aa, synthetic construct
  REGION 1..279: note = source = /note="Description of Artificial Sequence: Synthetic polypeptide"
MALPVTALLLPLALLLHAARPEVQLVESGGGLVQPGTSLKLSCVASGFTFSSSGMQWIRQAPKKGLEWISGIYYDSYKKSYADSVKGRFTISRDNSKNTLYLEMNSLRSEDTATYYCAKSAYYGYKDYFDYWGQGVMVTVSSGGGGSGGGGSGGGGSGGGGSDIQMTQSPPSLSASLGDKVTITCQASQNINKYIAWYQQKPGKAPRLLIRYTSTLESGTPSRFSGSGSGRDYSFSISNVESGDVASYYCLQYDDLPYTFGPGTKLELKGSHHHHHHHH

SEQ ID NO: 828 - DNA, 1476 bp, synthetic construct
  misc_feature 1..1476: note = source = /note="Description of Artificial Sequence: Synthetic polynucleotide"
  source 1..1476: mol_type = other DNA
atggccctccctgtcaccgccctgctgcttccgctggctcttctgctccacgccgctcggcccgaggtccagcttgtggaatcaggaggcggactcgtccagccgggtactagcctgaagctcagctgtgtggccagcggttttaccttctcgtcctccgggatgcagtggattcggcaggctcccaagaagggactggaatggatctcgggcatctactacgactcgtacaagaagtcctacgccgattccgtgaaaggtcgcttcaccatctcccgggacaacagcaagaacactctgtacctcgagatgaactccttgcgctccgaggataccgcaacctattactgcgccaagtcggcctactacggctacaaggactacttcgactattggggccagggagtgatggtgaccgtgtcctccggcggtggaggctcaggggggggcggctcgggagggggtggaagcggaggaggaggctccgacatccaaatgacacagtcacccccttctctttccgcgagcctgggagataaggtcaccattacgtgccaagcgtcccagaacatcaacaagtacatcgcctggtaccagcagaaaccgggaaaggccccgcggctgctgattagatacacctcgactctggaatccggcactccatcaagattcagcggctccggcagcgggagggactactcgttctccatctccaatgtggagtccggggacgtggccagctactattgcctgcaatacgacgatctgccctacaccttcggacctggaaccaagctggaactcaagaccactaccccagcaccgaggccacccaccccggctcctaccatcgcctcccagcctctgtccctgcgtccggaggcatgtagacccgcagctggtggggccgtgcatacccggggtcttgacttcgcctgcgatatctacatttgggcccctctggctggtacttgcggggtcctgctgctttcactcgtgatcactctttactgtaagcgcggtcggaagaagctgctgtacatctttaagcaacccttcatgaggcctgtgcagactactcaagaggaggacggctgttcatgccggttcccagaggaggaggaaggcggctgcgaactgcgcgtgaaattcagccgcagcgcagatgctccagcctacaagcaggggcagaaccagctctacaacgaactcaatcttggtcggagagaggagtacgacgtgctggacaagcggagaggacgggacccagaaatgggcgggaagccgcgcagaaagaatccccaagagggcctgtacaacgagctccaaaaggataagatggcagaagcctatagcgagattggtatgaaaggggaacgcagaagaggcaaaggccacgacggactgtaccagggactcagcaccgccaccaaggacacctatgacgctcttcacatgcaggccctgccgcctcgg

SEQ ID NO: 829 - protein, 492 aa, synthetic construct
  REGION 1..492: note = source = /note="Description of Artificial Sequence: Synthetic polypeptide"
MALPVTALLLPLALLLHAARPEVQLVESGGGLVQPGTSLKLSCVASGFTFSSSGMQWIRQAPKKGLEWISGIYYDSYKKSYADSVKGRFTISRDNSKNTLYLEMNSLRSEDTATYYCAKSAYYGYKDYFDYWGQGVMVTVSSGGGGSGGGGSGGGGSGGGGSDIQMTQSPPSLSASLGDKVTITCQASQNINKYIAWYQQKPGKAPRLLIRYTSTLESGTPSRFSGSGSGRDYSFSISNVESGDVASYYCLQYDDLPYTFGPGTKLELKTTTPAPRPPTPAPTIASQPLSLRPEACRPAAGGAVHTRGLDFACDIYIWAPLAGTCGVLLLSLVITLYCKRGRKKLLYIFKQPFMRPVQTTQEEDGCSCRFPEEEEGGCELRVKFSRSADAPAYKQGQNQLYNELNLGRREEYDVLDKRRGRDPEMGGKPRRKNPQEGLYNELQKDKMAEAYSEIGMKGERRRGKGHDGLYQGLSTATKDTYDALHMQALPPR

SEQ ID NO: 830 - protein, 250 aa, synthetic construct
  REGION 1..250: note = source = /note="Description of Artificial Sequence: Synthetic polypeptide"
QVTLKESGPGLLQPSQTLSLTCTFAGFSLNTHGMGVGWIRQPSGKGLEWLANIWWDDDKYYNPSLKNRLTMSKDTSNNQAFLKITNVDTADTATYYCARIEGSPVVTTVFDYWGQGVMVTVSSGGGGSGGGGSGGGGSGGGGSDIQMTQSPSFLSASVGDRVTINCKASQNINRYLNWYQQKLGEAPKLLIYNANSLQTGIPSRFSGSGSGTDFTLTISSLQPADVATYFCLQHNSRPLTFGSGTILEIK

SEQ ID NO: 831 - DNA, 750 bp, synthetic construct
  misc_feature 1..750: note = source = /note="Description of Artificial Sequence: Synthetic polynucleotide"
  source 1..750: mol_type = other DNA
caagtcactcttaaggaatccgggccaggactgttgcagccgagccagaccctgtccctcacttgtaccttcgccggcttttcactgaacacccacggaatgggcgtgggatggattaggcagccctcgggaaagggactggagtggctggccaacatttggtgggacgacgacaagtattacaacccgagcctcaagaaccgcctgactatgtccaaggatacctccaacaaccaggccttcctgaaaatcactaacgtggataccgctgacaccgcaacgtactactgcgcccggatcgaaggttcccccgtcgtgacaactgtgttcgactactggggacagggcgtgatggtgaccgtgtcctccggcggtggaggctcaggggggggcggctcgggagggggtggaagcggaggaggaggctccgacatccaaatgacccagtcacctagctttctgtcggcctcggtcggcgacagagtgaccattaactgcaaagcgtcccagaacatcaaccgctacctgaattggtaccagcagaagctgggggaagccccgaagctgctgatctacaacgcgaacagcctccagactggtattccttcccggttctccgggagcggctcgggtaccgatttcaccctcaccatctcctcccttcaacccgctgacgtggccacctacttctgcttgcaacataattctcggcctctgaccttcggaagcggcactatcctcgagatcaag

SEQ ID NO: 832 - DNA, 843 bp, synthetic construct
  misc_feature 1..843: note = source = /note="Description of Artificial Sequence: Synthetic polynucleotide"
  source 1..843: mol_type = other DNA
atggccctccctgtcaccgccctgctgcttccgctggctcttctgctccacgccgctcggccccaagtcactcttaaggaatccgggccaggactgttgcagccgagccagaccctgtccctcacttgtaccttcgccggcttttcactgaacacccacggaatgggcgtgggatggattaggcagccctcgggaaagggactggagtggctggccaacatttggtgggacgacgacaagtattacaacccgagcctcaagaaccgcctgactatgtccaaggatacctccaacaaccaggccttcctgaaaatcactaacgtggataccgctgacaccgcaacgtactactgcgcccggatcgaaggttcccccgtcgtgacaactgtgttcgactactggggacagggcgtgatggtgaccgtgtcctccggcggtggaggctcaggggggggcggctcgggagggggtggaagcggaggaggaggctccgacatccaaatgacccagtcacctagctttctgtcggcctcggtcggcgacagagtgaccattaactgcaaagcgtcccagaacatcaaccgctacctgaattggtaccagcagaagctgggggaagccccgaagctgctgatctacaacgcgaacagcctccagactggtattccttcccggttctccgggagcggctcgggtaccgatttcaccctcaccatctcctcccttcaacccgctgacgtggccacctacttctgcttgcaacataattctcggcctctgaccttcggaagcggcactatcctcgagatcaagggatcgcaccaccatcaccatcatcatcac

SEQ ID NO: 833 - protein, 281 aa, synthetic construct
  REGION 1..281: note = source = /note="Description of Artificial Sequence: Synthetic polypeptide"
MALPVTALLLPLALLLHAARPQVTLKESGPGLLQPSQTLSLTCTFAGFSLNTHGMGVGWIRQPSGKGLEWLANIWWDDDKYYNPSLKNRLTMSKDTSNNQAFLKITNVDTADTATYYCARIEGSPVVTTVFDYWGQGVMVTVSSGGGGSGGGGSGGGGSGGGGSDIQMTQSPSFLSASVGDRVTINCKASQNINRYLNWYQQKLGEAPKLLIYNANSLQTGIPSRFSGSGSGTDFTLTISSLQPADVATYFCLQHNSRPLTFGSGTILEIKGSHHHHHHHH

SEQ ID NO: 834 - DNA, 1482 bp, synthetic construct
  misc_feature 1..1482: note = source = /note="Description of Artificial Sequence: Synthetic polynucleotide"
  source 1..1482: mol_type = other DNA
atggccctccctgtcaccgccctgctgcttccgctggctcttctgctccacgccgctcggccccaagtcactcttaaggaatccgggccaggactgttgcagccgagccagaccctgtccctcacttgtaccttcgccggcttttcactgaacacccacggaatgggcgtgggatggattaggcagccctcgggaaagggactggagtggctggccaacatttggtgggacgacgacaagtattacaacccgagcctcaagaaccgcctgactatgtccaaggatacctccaacaaccaggccttcctgaaaatcactaacgtggataccgctgacaccgcaacgtactactgcgcccggatcgaaggttcccccgtcgtgacaactgtgttcgactactggggacagggcgtgatggtgaccgtgtcctccggcggtggaggctcaggggggggcggctcgggagggggtggaagcggaggaggaggctccgacatccaaatgacccagtcacctagctttctgtcggcctcggtcggcgacagagtgaccattaactgcaaagcgtcccagaacatcaaccgctacctgaattggtaccagcagaagctgggggaagccccgaagctgctgatctacaacgcgaacagcctccagactggtattccttcccggttctccgggagcggctcgggtaccgatttcaccctcaccatctcctcccttcaacccgctgacgtggccacctacttctgcttgcaacataattctcggcctctgaccttcggaagcggcactatcctcgagatcaagaccactaccccagcaccgaggccacccaccccggctcctaccatcgcctcccagcctctgtccctgcgtccggaggcatgtagacccgcagctggtggggccgtgcatacccggggtcttgacttcgcctgcgatatctacatttgggcccctctggctggtacttgcggggtcctgctgctttcactcgtgatcactctttactgtaagcgcggtcggaagaagctgctgtacatctttaagcaacccttcatgaggcctgtgcagactactcaagaggaggacggctgttcatgccggttcccagaggaggaggaaggcggctgcgaactgcgcgtgaaattcagccgcagcgcagatgctccagcctacaagcaggggcagaaccagctctacaacgaactcaatcttggtcggagagaggagtacgacgtgctggacaagcggagaggacgggacccagaaatgggcgggaagccgcgcagaaagaatccccaagagggcctgtacaacgagctccaaaaggataagatggcagaagcctatagcgagattggtatgaaaggggaacgcagaagaggcaaaggccacgacggactgtaccagggactcagcaccgccaccaaggacacctatgacgctcttcacatgcaggccctgccgcctcgg

SEQ ID NO: 835 - protein, 494 aa, synthetic construct
  REGION 1..494: note = source = /note="Description of Artificial Sequence: Synthetic polypeptide"
MALPVTALLLPLALLLHAARPQVTLKESGPGLLQPSQTLSLTCTFAGFSLNTHGMGVGWIRQPSGKGLEWLANIWWDDDKYYNPSLKNRLTMSKDTSNNQAFLKITNVDTADTATYYCARIEGSPVVTTVFDYWGQGVMVTVSSGGGGSGGGGSGGGGSGGGGSDIQMTQSPSFLSASVGDRVTINCKASQNINRYLNWYQQKLGEAPKLLIYNANSLQTGIPSRFSGSGSGTDFTLTISSLQPADVATYFCLQHNSRPLTFGSGTILEIKTTTPAPRPPTPAPTIASQPLSLRPEACRPAAGGAVHTRGLDFACDIYIWAPLAGTCGVLLLSLVITLYCKRGRKKLLYIFKQPFMRPVQTTQEEDGCSCRFPEEEEGGCELRVKFSRSADAPAYKQGQNQLYNELNLGRREEYDVLDKRRGRDPEMGGKPRRKNPQEGLYNELQKDKMAEAYSEIGMKGERRRGKGHDGLYQGLSTATKDTYDALHMQALPPR

SEQ ID NO: 836 - protein, 248 aa, synthetic construct
  REGION 1..248: note = source = /note="Description of Artificial Sequence: Synthetic polypeptide"
QVTLKESGPGMLQPSKTLSLTCSFSGFSLSTSGMVVSWIRQPSGKSLEWLAAIAWDGDKYYNPSLKSRVTVSKDTSNTQVFLRITSVDIADTATYYCTRRDYDVGYYYFDFWGQGVMVTVSSGGGGSGGGGSGGGGSGGGGSKIVLTQSPTITAASPGEKVTITCLASSRVSNIYWYQQKSGASPKLLIYSTSSLASGVPYRFSGSGSGTSYSLTINTMEAEDAATYYCHQWSSNPWTFGGGTKLELK

SEQ ID NO: 837 - DNA, 744 bp, synthetic construct
  misc_feature 1..744: note = source = /note="Description of Artificial Sequence: Synthetic polynucleotide"
  source 1..744: mol_type = other DNA
caagtcaccctgaaagaatcgggtcccggaatgctgcagccatccaagacgctgtcccttacatgctccttctccgggttcagcctctcaacttccgggatggtggtgtcatggatcagacagccgagcggaaagtccctggagtggctggcggccatcgcatgggatggcgataagtactacaacccgagcctgaagtcaagggtcactgtgtccaaggacacctccaacacccaagtgttccttcggatcacctccgtggacattgctgacaccgccacctattactgcactcgccgggactacgacgtgggctactactacttcgatttctggggacagggtgtcatggtgaccgtgtcctccggcggtggaggctcaggggggggcggctcgggagggggtggaagcggaggaggaggctccaagattgtgctgacccagagccccactattaccgccgcctccccgggggaaaaggtcaccatcacttgtctggcgtcctcacgcgtgtcgaatatctactggtatcagcagaagtccggcgccagccccaagctgctgatctactcgacctcctccctcgcgtcgggagtgccttaccggttttctggctcgggaagcggaaccagctactccttgaccatcaacaccatggaagccgaggacgctgccacttactactgccaccagtggtcgagcaacccttggactttcggtggaggcaccaaactcgagctcaag

SEQ ID NO: 838 - DNA, 837 bp, synthetic construct
  misc_feature 1..837: note = source = /note="Description of Artificial Sequence: Synthetic polynucleotide"
  source 1..837: mol_type = other DNA
atggccctccctgtcaccgccctgctgcttccgctggctcttctgctccacgccgctcggccccaagtcaccctgaaagaatcgggtcccggaatgctgcagccatccaagacgctgtcccttacatgctccttctccgggttcagcctctcaacttccgggatggtggtgtcatggatcagacagccgagcggaaagtccctggagtggctggcggccatcgcatgggatggcgataagtactacaacccgagcctgaagtcaagggtcactgtgtccaaggacacctccaacacccaagtgttccttcggatcacctccgtggacattgctgacaccgccacctattactgcactcgccgggactacgacgtgggctactactacttcgatttctggggacagggtgtcatggtgaccgtgtcctccggcggtggaggctcaggggggggcggctcgggagggggtggaagcggaggaggaggctccaagattgtgctgacccagagccccactattaccgccgcctccccgggggaaaaggtcaccatcacttgtctggcgtcctcacgcgtgtcgaatatctactggtatcagcagaagtccggcgccagccccaagctgctgatctactcgacctcctccctcgcgtcgggagtgccttaccggttttctggctcgggaagcggaaccagctactccttgaccatcaacaccatggaagccgaggacgctgccacttactactgccaccagtggtcgagcaacccttggactttcggtggaggcaccaaactcgagctcaagggatcgcaccaccatcaccatcatcatcac

SEQ ID NO: 839 - protein, 279 aa, synthetic construct
  REGION 1..279: note = source = /note="Description of Artificial Sequence: Synthetic polypeptide"
MALPVTALLLPLALLLHAARPQVTLKESGPGMLQPSKTLSLTCSFSGFSLSTSGMVVSWIRQPSGKSLEWLAAIAWDGDKYYNPSLKSRVTVSKDTSNTQVFLRITSVDIADTATYYCTRRDYDVGYYYFDFWGQGVMVTVSSGGGGSGGGGSGGGGSGGGGSKIVLTQSPTITAASPGEKVTITCLASSRVSNIYWYQQKSGASPKLLIYSTSSLASGVPYRFSGSGSGTSYSLTINTMEAEDAATYYCHQWSSNPWTFGGGTKLELKGSHHHHHHHH

SEQ ID NO: 840 - DNA, 1476 bp, synthetic construct
  misc_feature 1..1476: note = source = /note="Description of Artificial Sequence: Synthetic polynucleotide"
  source 1..1476: mol_type = other DNA
atggccctccctgtcaccgccctgctgcttccgctggctcttctgctccacgccgctcggccccaagtcaccctgaaagaatcgggtcccggaatgctgcagccatccaagacgctgtcccttacatgctccttctccgggttcagcctctcaacttccgggatggtggtgtcatggatcagacagccgagcggaaagtccctggagtggctggcggccatcgcatgggatggcgataagtactacaacccgagcctgaagtcaagggtcactgtgtccaaggacacctccaacacccaagtgttccttcggatcacctccgtggacattgctgacaccgccacctattactgcactcgccgggactacgacgtgggctactactacttcgatttctggggacagggtgtcatggtgaccgtgtcctccggcggtggaggctcaggggggggcggctcgggagggggtggaagcggaggaggaggctccaagattgtgctgacccagagccccactattaccgccgcctccccgggggaaaaggtcaccatcacttgtctggcgtcctcacgcgtgtcgaatatctactggtatcagcagaagtccggcgccagccccaagctgctgatctactcgacctcctccctcgcgtcgggagtgccttaccggttttctggctcgggaagcggaaccagctactccttgaccatcaacaccatggaagccgaggacgctgccacttactactgccaccagtggtcgagcaacccttggactttcggtggaggcaccaaactcgagctcaagaccactaccccagcaccgaggccacccaccccggctcctaccatcgcctcccagcctctgtccctgcgtccggaggcatgtagacccgcagctggtggggccgtgcatacccggggtcttgacttcgcctgcgatatctacatttgggcccctctggctggtacttgcggggtcctgctgctttcactcgtgatcactctttactgtaagcgcggtcggaagaagctgctgtacatctttaagcaacccttcatgaggcctgtgcagactactcaagaggaggacggctgttcatgccggttcccagaggaggaggaaggcggctgcgaactgcgcgtgaaattcagccgcagcgcagatgctccagcctacaagcaggggcagaaccagctctacaacgaactcaatcttggtcggagagaggagtacgacgtgctggacaagcggagaggacgggacccagaaatgggcgggaagccgcgcagaaagaatccccaagagggcctgtacaacgagctccaaaaggataagatggcagaagcctatagcgagattggtatgaaaggggaacgcagaagaggcaaaggccacgacggactgtaccagggactcagcaccgccaccaaggacacctatgacgctcttcacatgcaggccctgccgcctcgg

SEQ ID NO: 841 - protein, 492 aa, synthetic construct
  REGION 1..492: note = source = /note="Description of Artificial Sequence: Synthetic polypeptide"
MALPVTALLLPLALLLHAARPQVTLKESGPGMLQPSKTLSLTCSFSGFSLSTSGMVVSWIRQPSGKSLEWLAAIAWDGDKYYNPSLKSRVTVSKDTSNTQVFLRITSVDIADTATYYCTRRDYDVGYYYFDFWGQGVMVTVSSGGGGSGGGGSGGGGSGGGGSKIVLTQSPTITAASPGEKVTITCLASSRVSNIYWYQQKSGASPKLLIYSTSSLASGVPYRFSGSGSGTSYSLTINTMEAEDAATYYCHQWSSNPWTFGGGTKLELKTTTPAPRPPTPAPTIASQPLSLRPEACRPAAGGAVHTRGLDFACDIYIWAPLAGTCGVLLLSLVITLYCKRGRKKLLYIFKQPFMRPVQTTQEEDGCSCRFPEEEEGGCELRVKFSRSADAPAYKQGQNQLYNELNLGRREEYDVLDKRRGRDPEMGGKPRRKNPQEGLYNELQKDKMAEAYSEIGMKGERRRGKGHDGLYQGLSTATKDTYDALHMQALPPR

SEQ ID NO: 842 - protein, 247 aa, synthetic construct
  REGION 1..247: note = source = /note="Description of Artificial Sequence: Synthetic polypeptide"
QIQLVQSGPELKKPGESVKISCKASGNTVTGYAMHWVRQAPGKGLKWMGWINTYSGKPTYADDFKGRCVFSLEASASTAHLQISNLKNEDTATYFCARSTYYGYKDWFAYWGQGTLVTVSSGGGGSGGGGSGGGGSGGGGSNIQLTQSPSRLSASVGDRVTLSCKGSQNINNYLAWYQQKLGEAPKLLIYNTNNLQTGIPSRFSGSGSGTDYTFTISGLQPEDVATYFCCQYNNGNTFGAGTKLELK

SEQ ID NO: 843 - DNA, 741 bp, synthetic construct
  misc_feature 1..741: note = source = /note="Description of Artificial Sequence: Synthetic polynucleotide"
  source 1..741: mol_type = other DNA
caaattcagttggtgcagtccggcccggagctgaagaagcctggagaatccgtgaagatctcgtgcaaagcttccgggaacaccgtgaccggatacgcaatgcactgggtccgccaggcaccgggaaagggactgaagtggatggggtggatcaacacctacagcggaaagccgacttacgccgatgactttaagggacgctgtgtgttctccctggaagcgtccgcctcgactgcccatcttcaaatctccaacctgaagaatgaggacaccgccacttacttctgcgcccggagcacctattacggctacaaggactggttcgcgtattggggccagggcactctcgtgaccgtgtcctccggcggtggaggctcaggggggggcggctcgggagggggtggaagcggaggaggaggctccaacatccaactgactcagagccccagccggctgtccgcctccgtgggggacagggtcacactgagctgcaagggttctcagaacatcaacaactacctcgcgtggtaccagcagaagctgggagaggcccccaagctgctcatctacaacaccaacaatctgcaaactggcattccatcgagattctcaggatcagggtccggtaccgactacaccttcacgatttcgggacttcagcctgaggatgtggccacctacttctgctgtcagtacaacaacggcaacaccttcggtgctggcaccaagctggaactcaaa

SEQ ID NO: 844 - DNA, 834 bp, synthetic construct
  misc_feature 1..834: note = source = /note="Description of Artificial Sequence: Synthetic polynucleotide"
  source 1..834: mol_type = other DNA
atggccctccctgtcaccgccctgctgcttccgctggctcttctgctccacgccgctcggccccaaattcagttggtgcagtccggcccggagctgaagaagcctggagaatccgtgaagatctcgtgcaaagcttccgggaacaccgtgaccggatacgcaatgcactgggtccgccaggcaccgggaaagggactgaagtggatggggtggatcaacacctacagcggaaagccgacttacgccgatgactttaagggacgctgtgtgttctccctggaagcgtccgcctcgactgcccatcttcaaatctccaacctgaagaatgaggacaccgccacttacttctgcgcccggagcacctattacggctacaaggactggttcgcgtattggggccagggcactctcgtgaccgtgtcctccggcggtggaggctcaggggggggcggctcgggagggggtggaagcggaggaggaggctccaacatccaactgactcagagccccagccggctgtccgcctccgtgggggacagggtcacactgagctgcaagggttctcagaacatcaacaactacctcgcgtggtaccagcagaagctgggagaggcccccaagctgctcatctacaacaccaacaatctgcaaactggcattccatcgagattctcaggatcagggtccggtaccgactacaccttcacgatttcgggacttcagcctgaggatgtggccacctacttctgctgtcagtacaacaacggcaacaccttcggtgctggcaccaagctggaactcaaaggatcgcaccaccatcaccatcatcatcac

SEQ ID NO: 845 - protein, 278 aa, synthetic construct
  REGION 1..278: note = source = /note="Description of Artificial Sequence: Synthetic polypeptide"
MALPVTALLLPLALLLHAARPQIQLVQSGPELKKPGESVKISCKASGNTVTGYAMHWVRQAPGKGLKWMGWINTYSGKPTYADDFKGRCVFSLEASASTAHLQISNLKNEDTATYFCARSTYYGYKDWFAYWGQGTLVTVSSGGGGSGGGGSGGGGSGGGGSNIQLTQSPSRLSASVGDRVTLSCKGSQNINNYLAWYQQKLGEAPKLLIYNTNNLQTGIPSRFSGSGSGTDYTFTISGLQPEDVATYFCCQYNNGNTFGAGTKLELKGSHHHHHHHH

SEQ ID NO: 846 - DNA, 1473 bp, synthetic construct
  misc_feature 1..1473: note = source = /note="Description of Artificial Sequence: Synthetic polynucleotide"
  source 1..1473: mol_type = other DNA
atggccctccctgtcaccgccctgctgcttccgctggctcttctgctccacgccgctcggccccaaattcagttggtgcagtccggcccggagctgaagaagcctggagaatccgtgaagatctcgtgcaaagcttccgggaacaccgtgaccggatacgcaatgcactgggtccgccaggcaccgggaaagggactgaagtggatggggtggatcaacacctacagcggaaagccgacttacgccgatgactttaagggacgctgtgtgttctccctggaagcgtccgcctcgactgcccatcttcaaatctccaacctgaagaatgaggacaccgccacttacttctgcgcccggagcacctattacggctacaaggactggttcgcgtattggggccagggcactctcgtgaccgtgtcctccggcggtggaggctcaggggggggcggctcgggagggggtggaagcggaggaggaggctccaacatccaactgactcagagccccagccggctgtccgcctccgtgggggacagggtcacactgagctgcaagggttctcagaacatcaacaactacctcgcgtggtaccagcagaagctgggagaggcccccaagctgctcatctacaacaccaacaatctgcaaactggcattccatcgagattctcaggatcagggtccggtaccgactacaccttcacgatttcgggacttcagcctgaggatgtggccacctacttctgctgtcagtacaacaacggcaacaccttcggtgctggcaccaagctggaactcaaaaccactaccccagcaccgaggccacccaccccggctcctaccatcgcctcccagcctctgtccctgcgtccggaggcatgtagacccgcagctggtggggccgtgcatacccggggtcttgacttcgcctgcgatatctacatttgggcccctctggctggtacttgcggggtcctgctgctttcactcgtgatcactctttactgtaagcgcggtcggaagaagctgctgtacatctttaagcaacccttcatgaggcctgtgcagactactcaagaggaggacggctgttcatgccggttcccagaggaggaggaaggcggctgcgaactgcgcgtgaaattcagccgcagcgcagatgctccagcctacaagcaggggcagaaccagctctacaacgaactcaatcttggtcggagagaggagtacgacgtgctggacaagcggagaggacgggacccagaaatgggcgggaagccgcgcagaaagaatccccaagagggcctgtacaacgagctccaaaaggataagatggcagaagcctatagcgagattggtatgaaaggggaacgcagaagaggcaaaggccacgacggactgtaccagggactcagcaccgccaccaaggacacctatgacgctcttcacatgcaggccctgccgcctcgg

SEQ ID NO: 847 - protein, 491 aa, synthetic construct
  REGION 1..491: note = source = /note="Description of Artificial Sequence: Synthetic polypeptide"
MALPVTALLLPLALLLHAARPQIQLVQSGPELKKPGESVKISCKASGNTVTGYAMHWVRQAPGKGLKWMGWINTYSGKPTYADDFKGRCVFSLEASASTAHLQISNLKNEDTATYFCARSTYYGYKDWFAYWGQGTLVTVSSGGGGSGGGGSGGGGSGGGGSNIQLTQSPSRLSASVGDRVTLSCKGSQNINNYLAWYQQKLGEAPKLLIYNTNNLQTGIPSRFSGSGSGTDYTFTISGLQPEDVATYFCCQYNNGNTFGAGTKLELKTTTPAPRPPTPAPTIASQPLSLRPEACRPAAGGAVHTRGLDFACDIYIWAPLAGTCGVLLLSLVITLYCKRGRKKLLYIFKQPFMRPVQTTQEEDGCSCRFPEEEEGGCELRVKFSRSADAPAYKQGQNQLYNELNLGRREEYDVLDKRRGRDPEMGGKPRRKNPQEGLYNELQKDKMAEAYSEIGMKGERRRGKGHDGLYQGLSTATKDTYDALHMQALPPR

SEQ ID NO: 848 - protein, 251 aa, synthetic construct
  REGION 1..251: note = source = /note="Description of Artificial Sequence: Synthetic polypeptide"
DIVMTQTPSSQAVSAGEKVTMSCKSSQSLLYSENKKNYLAWYQQKPGQSPKLLIFWASTRESGVPDRFIGSGSGTDFTLTISSVQAEDLAVYYCQQYYNFPTFGSGTKLEIKGGGGSGGGGSGGGGSGGGGSEVQLVESGGGLVQPGRSLKLSCAASGFTFRDYYMAWVRQAPKKGLEWVASISYEGNPYYGDSVKGRFTISRNNAKSTLYLQMNSLRSEDTATYYCARHDHNNVDWFAYWGQGTLVTVSS

SEQ ID NO: 849 - DNA, 753 bp, synthetic construct
  misc_feature 1..753: note = source = /note="Description of Artificial Sequence: Synthetic polynucleotide"
  source 1..753: mol_type = other DNA
gacatcgtgatgactcagactccaagcagccaggccgtgtccgccggagagaaagtcaccatgtcgtgcaagagctcccagtccctgctgtactccgaaaacaagaagaattatctcgcctggtaccagcagaagcctggacagtccccgaagctcctgatcttttgggcgtcgaccagggaatccggcgtgcccgatcgcttcattggctccggttccggcaccgacttcaccctgaccattagcagcgtccaggcggaggacctggctgtgtactactgccaacagtactacaacttccccactttcggatcggggaccaagctggagatcaagggcggtggaggctcaggggggggcggctcgggagggggtggaagcggaggaggaggctccgaagtgcagcttgtggagtctggcggcggtctggtgcagccgggaagatccctgaagctgtcatgcgccgcgtccgggtttaccttccgcgattactacatggcctgggtcagacaggcacctaagaaggggctggaatgggtggcatccatctcatatgaaggaaacccgtactacggagactcggtgaaaggccgcttcactatctcacggaacaacgctaagagcacgctgtacttgcaaatgaactccctccggtcggaggacacagccacttactactgtgcccggcacgaccataacaacgtcgattggttcgcctactggggtcaaggaaccctcgtgaccgtgtcctcc

SEQ ID NO: 850 - DNA, 846 bp, synthetic construct
  misc_feature 1..846: note = source = /note="Description of Artificial Sequence: Synthetic polynucleotide"
  source 1..846: mol_type = other DNA
atggccctccctgtcaccgccctgctgcttccgctggctcttctgctccacgccgctcggcccgacatcgtgatgactcagactccaagcagccaggccgtgtccgccggagagaaagtcaccatgtcgtgcaagagctcccagtccctgctgtactccgaaaacaagaagaattatctcgcctggtaccagcagaagcctggacagtccccgaagctcctgatcttttgggcgtcgaccagggaatccggcgtgcccgatcgcttcattggctccggttccggcaccgacttcaccctgaccattagcagcgtccaggcggaggacctggctgtgtactactgccaacagtactacaacttccccactttcggatcggggaccaagctggagatcaagggcggtggaggctcaggggggggcggctcgggagggggtggaagcggaggaggaggctccgaagtgcagcttgtggagtctggcggcggtctggtgcagccgggaagatccctgaagctgtcatgcgccgcgtccgggtttaccttccgcgattactacatggcctgggtcagacaggcacctaagaaggggctggaatgggtggcatccatctcatatgaaggaaacccgtactacggagactcggtgaaaggccgcttcactatctcacggaacaacgctaagagcacgctgtacttgcaaatgaactccctccggtcggaggacacagccacttactactgtgcccggcacgaccataacaacgtcgattggttcgcctactggggtcaaggaaccctcgtgaccgtgtcctccggatcgcaccaccatcaccatcatcatcac

SEQ ID NO: 851 - protein, 282 aa, synthetic construct
  REGION 1..282: note = source = /note="Description of Artificial Sequence: Synthetic polypeptide"
MALPVTALLLPLALLLHAARPDIVMTQTPSSQAVSAGEKVTMSCKSSQSLLYSENKKNYLAWYQQKPGQSPKLLIFWASTRESGVPDRFIGSGSGTDFTLTISSVQAEDLAVYYCQQYYNFPTFGSGTKLEIKGGGGSGGGGSGGGGSGGGGSEVQLVESGGGLVQPGRSLKLSCAASGFTFRDYYMAWVRQAPKKGLEWVASISYEGNPYYGDSVKGRFTISRNNAKSTLYLQMNSLRSEDTATYYCARHDHNNVDWFAYWGQGTLVTVSSGSHHHHHHHH

SEQ ID NO: 852 - DNA, 1485 bp, synthetic construct
  misc_feature 1..1485: note = source = /note="Description of Artificial Sequence: Synthetic polynucleotide"
  source 1..1485: mol_type = other DNA
atggccctccctgtcaccgccctgctgcttccgctggctcttctgctccacgccgctcggcccgacatcgtgatgactcagactccaagcagccaggccgtgtccgccggagagaaagtcaccatgtcgtgcaagagctcccagtccctgctgtactccgaaaacaagaagaattatctcgcctggtaccagcagaagcctggacagtccccgaagctcctgatcttttgggcgtcgaccagggaatccggcgtgcccgatcgcttcattggctccggttccggcaccgacttcaccctgaccattagcagcgtccaggcggaggacctggctgtgtactactgccaacagtactacaacttccccactttcggatcggggaccaagctggagatcaagggcggtggaggctcaggggggggcggctcgggagggggtggaagcggaggaggaggctccgaagtgcagcttgtggagtctggcggcggtctggtgcagccgggaagatccctgaagctgtcatgcgccgcgtccgggtttaccttccgcgattactacatggcctgggtcagacaggcacctaagaaggggctggaatgggtggcatccatctcatatgaaggaaacccgtactacggagactcggtgaaaggccgcttcactatctcacggaacaacgctaagagcacgctgtacttgcaaatgaactccctccggtcggaggacacagccacttactactgtgcccggcacgaccataacaacgtcgattggttcgcctactggggtcaaggaaccctcgtgaccgtgtcctccaccactaccccagcaccgaggccacccaccccggctcctaccatcgcctcccagcctctgtccctgcgtccggaggcatgtagacccgcagctggtggggccgtgcatacccggggtcttgacttcgcctgcgatatctacatttgggcccctctggctggtacttgcggggtcctgctgctttcactcgtgatcactctttactgtaagcgcggtcggaagaagctgctgtacatctttaagcaacccttcatgaggcctgtgcagactactcaagaggaggacggctgttcatgccggttcccagaggaggaggaaggcggctgcgaactgcgcgtgaaattcagccgcagcgcagatgctccagcctacaagcaggggcagaaccagctctacaacgaactcaatcttggtcggagagaggagtacgacgtgctggacaagcggagaggacgggacccagaaatgggcgggaagccgcgcagaaagaatccccaagagggcctgtacaacgagctccaaaaggataagatggcagaagcctatagcgagattggtatgaaaggggaacgcagaagaggcaaaggccacgacggactgtaccagggactcagcaccgccaccaaggacacctatgacgctcttcacatgcaggccctgccgcctcgg

SEQ ID NO: 853 - protein, 495 aa, synthetic construct
  REGION 1..495: note = source = /note="Description of Artificial Sequence: Synthetic polypeptide"
MALPVTALLLPLALLLHAARPDIVMTQTPSSQAVSAGEKVTMSCKSSQSLLYSENKKNYLAWYQQKPGQSPKLLIFWASTRESGVPDRFIGSGSGTDFTLTISSVQAEDLAVYYCQQYYNFPTFGSGTKLEIKGGGGSGGGGSGGGGSGGGGSEVQLVESGGGLVQPGRSLKLSCAASGFTFRDYYMAWVRQAPKKGLEWVASISYEGNPYYGDSVKGRFTISRNNAKSTLYLQMNSLRSEDTATYYCARHDHNNVDWFAYWGQGTLVTVSSTTTPAPRPPTPAPTIASQPLSLRPEACRPAAGGAVHTRGLDFACDIYIWAPLAGTCGVLLLSLVITLYCKRGRKKLLYIFKQPFMRPVQTTQEEDGCSCRFPEEEEGGCELRVKFSRSADAPAYKQGQNQLYNELNLGRREEYDVLDKRRGRDPEMGGKPRRKNPQEGLYNELQKDKMAEAYSEIGMKGERRRGKGHDGLYQGLSTATKDTYDALHMQALPPR

SEQ ID NO: 854 - protein, 248 aa, synthetic construct
  REGION 1..248: note = source = /note="Description of Artificial Sequence: Synthetic polypeptide"
DIQMTQSPPSLSASLGDKVTITCQASQNINKYIAWYQQKPGKAPRLLIRYTSTLESGTPSRFSGSGSGRDYSFSISNVESGDVASYYCLQYDDLPYTFGPGTKLELKGGGGSGGGGSGGGGSGGGGSEVQLVESGGGLVQPGTSLKLSCVASGFTFSSSGMQWIRQAPKKGLEWISGIYYDSYKKSYADSVKGRFTISRDNSKNTLYLEMNSLRSEDTATYYCAKSAYYGYKDYFDYWGQGVMVTVSS

SEQ ID NO: 855 - DNA, 744 bp, synthetic construct
  misc_feature 1..744: note = source = /note="Description of Artificial Sequence: Synthetic polynucleotide"
  source 1..744: mol_type = other DNA
gacatccaaatgacacagtcacccccttctctttccgcgagcctgggagataaggtcaccattacgtgccaagcgtcccagaacatcaacaagtacatcgcctggtaccagcagaaaccgggaaaggccccgcggctgctgattagatacacctcgactctggaatccggcactccatcaagattcagcggctccggcagcgggagggactactcgttctccatctccaatgtggagtccggggacgtggccagctactattgcctgcaatacgacgatctgccctacaccttcggacctggaaccaagctggaactcaagggcggtggaggctcaggggggggcggctcgggagggggtggaagcggaggaggaggctccgaggtccagcttgtggaatcaggaggcggactcgtccagccgggtactagcctgaagctcagctgtgtggccagcggttttaccttctcgtcctccgggatgcagtggattcggcaggctcccaagaagggactggaatggatctcgggcatctactacgactcgtacaagaagtcctacgccgattccgtgaaaggtcgcttcaccatctcccgggacaacagcaagaacactctgtacctcgagatgaactccttgcgctccgaggataccgcaacctattactgcgccaagtcggcctactacggctacaaggactacttcgactattggggccagggagtgatggtgaccgtgtcctcc

SEQ ID NO: 856 - DNA, 837 bp, synthetic construct
  misc_feature 1..837: note = source = /note="Description of Artificial Sequence: Synthetic polynucleotide"
  source 1..837: mol_type = other DNA
atggccctccctgtcaccgccctgctgcttccgctggctcttctgctccacgccgctcggcccgacatccaaatgacacagtcacccccttctctttccgcgagcctgggagataaggtcaccattacgtgccaagcgtcccagaacatcaacaagtacatcgcctggtaccagcagaaaccgggaaaggccccgcggctgctgattagatacacctcgactctggaatccggcactccatcaagattcagcggctccggcagcgggagggactactcgttctccatctccaatgtggagtccggggacgtggccagctactattgcctgcaatacgacgatctgccctacaccttcggacctggaaccaagctggaactcaagggcggtggaggctcaggggggggcggctcgggagggggtggaagcggaggaggaggctccgaggtccagcttgtggaatcaggaggcggactcgtccagccgggtactagcctgaagctcagctgtgtggccagcggttttaccttctcgtcctccgggatgcagtggattcggcaggctcccaagaagggactggaatggatctcgggcatctactacgactcgtacaagaagtcctacgccgattccgtgaaaggtcgcttcaccatctcccgggacaacagcaagaacactctgtacctcgagatgaactccttgcgctccgaggataccgcaacctattactgcgccaagtcggcctactacggctacaaggactacttcgactattggggccagggagtgatggtgaccgtgtcctccggatcgcaccaccatcaccatcatcatcac

SEQ ID NO: 857 - protein, 279 aa, synthetic construct
  REGION 1..279: note = source = /note="Description of Artificial Sequence: Synthetic polypeptide"
MALPVTALLLPLALLLHAARPDIQMTQSPPSLSASLGDKVTITCQASQNINKYIAWYQQKPGKAPRLLIRYTSTLESGTPSRFSGSGSGRDYSFSISNVESGDVASYYCLQYDDLPYTFGPGTKLELKGGGGSGGGGSGGGGSGGGGSEVQLVESGGGLVQPGTSLKLSCVASGFTFSSSGMQWIRQAPKKGLEWISGIYYDSYKKSYADSVKGRFTISRDNSKNTLYLEMNSLRSEDTATYYCAKSAYYGYKDYFDYWGQGVMVTVSSGSHHHHHHHH

SEQ ID NO: 858 - DNA, 1476 bp, synthetic construct
  misc_feature 1..1476: note = source = /note="Description of Artificial Sequence: Synthetic polynucleotide"
  source 1..1476: mol_type = other DNA
atggccctccctgtcaccgccctgctgcttccgctggctcttctgctccacgccgctcggcccgacatccaaatgacacagtcacccccttctctttccgcgagcctgggagataaggtcaccattacgtgccaagcgtcccagaacatcaacaagtacatcgcctggtaccagcagaaaccgggaaaggccccgcggctgctgattagatacacctcgactctggaatccggcactccatcaagattcagcggctccggcagcgggagggactactcgttctccatctccaatgtggagtccggggacgtggccagctactattgcctgcaatacgacgatctgccctacaccttcggacctggaaccaagctggaactcaagggcggtggaggctcaggggggggcggctcgggagggggtggaagcggaggaggaggctccgaggtccagcttgtggaatcaggaggcggactcgtccagccgggtactagcctgaagctcagctgtgtggccagcggttttaccttctcgtcctccgggatgcagtggattcggcaggctcccaagaagggactggaatggatctcgggcatctactacgactcgtacaagaagtcctacgccgattccgtgaaaggtcgcttcaccatctcccgggacaacagcaagaacactctgtacctcgagatgaactccttgcgctccgaggataccgcaacctattactgcgccaagtcggcctactacggctacaaggactacttcgactattggggccagggagtgatggtgaccgtgtcctccaccactaccccagcaccgaggccacccaccccggctcctaccatcgcctcccagcctctgtccctgcgtccggaggcatgtagacccgcagctggtggggccgtgcatacccggggtcttgacttcgcctgcgatatctacatttgggcccctctggctggtacttgcggggtcctgctgctttcactcgtgatcactctttactgtaagcgcggtcggaagaagctgctgtacatctttaagcaacccttcatgaggcctgtgcagactactcaagaggaggacggctgttcatgccggttcccagaggaggaggaaggcggctgcgaactgcgcgtgaaattcagccgcagcgcagatgctccagcctacaagcaggggcagaaccagctctacaacgaactcaatcttggtcggagagaggagtacgacgtgctggacaagcggagaggacgggacccagaaatgggcgggaagccgcgcagaaagaatccccaagagggcctgtacaacgagctccaaaaggataagatggcagaagcctatagcgagattggtatgaaaggggaacgcagaagaggcaaaggccacgacggactgtaccagggactcagcaccgccaccaaggacacctatgacgctcttcacatgcaggccctgccgcctcgg

SEQ ID NO: 859 - protein, 492 aa, synthetic construct
  REGION 1..492: note = source = /note="Description of Artificial Sequence: Synthetic polypeptide"
MALPVTALLLPLALLLHAARPDIQMTQSPPSLSASLGDKVTITCQASQNINKYIAWYQQKPGKAPRLLIRYTSTLESGTPSRFSGSGSGRDYSFSISNVESGDVASYYCLQYDDLPYTFGPGTKLELKGGGGSGGGGSGGGGSGGGGSEVQLVESGGGLVQPGTSLKLSCVASGFTFSSSGMQWIRQAPKKGLEWISGIYYDSYKKSYADSVKGRFTISRDNSKNTLYLEMNSLRSEDTATYYCAKSAYYGYKDYFDYWGQGVMVTVSSTTTPAPRPPTPAPTIASQPLSLRPEACRPAAGGAVHTRGLDFACDIYIWAPLAGTCGVLLLSLVITLYCKRGRKKLLYIFKQPFMRPVQTTQEEDGCSCRFPEEEEGGCELRVKFSRSADAPAYKQGQNQLYNELNLGRREEYDVLDKRRGRDPEMGGKPRRKNPQEGLYNELQKDKMAEAYSEIGMKGERRRGKGHDGLYQGLSTATKDTYDALHMQALPPR

SEQ ID NO: 860 - protein, 255 aa, synthetic construct
  REGION 1..255: note = source = /note="Description of Artificial Sequence: Synthetic polypeptide"
DIVMTQTPSSQAVSAGEKVTMSCKSSQSLLYSENKKNYLAWYQQKPGQSPKLLIYWASTRESGVPDRFIGSGSGTDFTLTISSVQAEDLAVYYCQQYYNFPPWTFGGGTKLELKGGGGSGGGGSGGGGSGGGGSQIQLVQSGPELKKPGESVKISCKTSEYTFTDYAFHWVKQAPGKGLKWMGWINTYSGKPTYADDFKGRFVFSLEDSARTANLQISNLKNEDTATYFCARGAYYGYRDWFTYWGQGTLVTVSS

SEQ ID NO: 861 - DNA, 765 bp, synthetic construct
  misc_feature 1..765: note = source = /note="Description of Artificial Sequence: Synthetic polynucleotide"
  source 1..765: mol_type = other DNA
gatattgtgatgacccagaccccgtcgagccaggcagtgtccgctggagaaaaggtcaccatgtcctgcaagagctcacagtccctgttgtactccgaaaacaagaagaattacctggcctggtaccagcagaagcccggacagtcccctaaactgctgatctactgggcctcgactagggaatctggcgtgcccgaccgctttatcggaagcggttcagggactgacttcaccctgaccattagcagcgtgcaggccgaggacctggcggtgtactactgtcaacagtactacaacttcccgccctggactttcggcggtggaacgaagctcgaactcaagggcggtggaggctcaggggggggcggctcgggagggggtggaagcggaggaggaggctcccaaattcaactggtccagtccggccctgagctgaagaagccgggagaatccgtgaagatctcctgcaagacctcggagtacaccttcactgactacgccttccactgggtcaagcaggcacctgggaaaggcctgaagtggatgggctggatcaacacttactcggggaagccaacctacgccgatgatttcaagggaagattcgtgtttagcctggaggactccgcccggacagctaacctccaaatctccaaccttaagaacgaggacactgcgacctacttctgcgcgcggggagcctattacggttatcgcgactggttcacctactggggacagggcaccctcgtgaccgtgtcctcc

SEQ ID NO: 862 - DNA, 858 bp, synthetic construct
  misc_feature 1..858: note = source = /note="Description of Artificial Sequence: Synthetic polynucleotide"
  source 1..858: mol_type = other DNA
atggccctccctgtcaccgccctgctgcttccgctggctcttctgctccacgccgctcggcccgatattgtgatgacccagaccccgtcgagccaggcagtgtccgctggagaaaaggtcaccatgtcctgcaagagctcacagtccctgttgtactccgaaaacaagaagaattacctggcctggtaccagcagaagcccggacagtcccctaaactgctgatctactgggcctcgactagggaatctggcgtgcccgaccgctttatcggaagcggttcagggactgacttcaccctgaccattagcagcgtgcaggccgaggacctggcggtgtactactgtcaacagtactacaacttcccgccctggactttcggcggtggaacgaagctcgaactcaagggcggtggaggctcaggggggggcggctcgggagggggtggaagcggaggaggaggctcccaaattcaactggtccagtccggccctgagctgaagaagccgggagaatccgtgaagatctcctgcaagacctcggagtacaccttcactgactacgccttccactgggtcaagcaggcacctgggaaaggcctgaagtggatgggctggatcaacacttactcggggaagccaacctacgccgatgatttcaagggaagattcgtgtttagcctggaggactccgcccggacagctaacctccaaatctccaaccttaagaacgaggacactgcgacctacttctgcgcgcggggagcctattacggttatcgcgactggttcacctactggggacagggcaccctcgtgaccgtgtcctccggatcgcaccaccatcaccatcatcatcac

SEQ ID NO: 863 - protein, 286 aa, synthetic construct
  REGION 1..286: note = source = /note="Description of Artificial Sequence: Synthetic polypeptide"
MALPVTALLLPLALLLHAARPDIVMTQTPSSQAVSAGEKVTMSCKSSQSLLYSENKKNYLAWYQQKPGQSPKLLIYWASTRESGVPDRFIGSGSGTDFTLTISSVQAEDLAVYYCQQYYNFPPWTFGGGTKLELKGGGGSGGGGSGGGGSGGGGSQIQLVQSGPELKKPGESVKISCKTSEYTFTDYAFHWVKQAPGKGLKWMGWINTYSGKPTYADDFKGRFVFSLEDSARTANLQISNLKNEDTATYFCARGAYYGYRDWFTYWGQGTLVTVSSGSHHHHHHHH

SEQ ID NO: 864 - DNA, 1497 bp, synthetic construct
  misc_feature 1..1497: note = source = /note="Description of Artificial Sequence: Synthetic polynucleotide"
  source 1..1497: mol_type = other DNA
atggccctccctgtcaccgccctgctgcttccgctggctcttctgctccacgccgctcggcccgatattgtgatgacccagaccccgtcgagccaggcagtgtccgctggagaaaaggtcaccatgtcctgcaagagctcacagtccctgttgtactccgaaaacaagaagaattacctggcctggtaccagcagaagcccggacagtcccctaaactgctgatctactgggcctcgactagggaatctggcgtgcccgaccgctttatcggaagcggttcagggactgacttcaccctgaccattagcagcgtgcaggccgaggacctggcggtgtactactgtcaacagtactacaacttcccgccctggactttcggcggtggaacgaagctcgaactcaagggcggtggaggctcaggggggggcggctcgggagggggtggaagcggaggaggaggctcccaaattcaactggtccagtccggccctgagctgaagaagccgggagaatccgtgaagatctcctgcaagacctcggagtacaccttcactgactacgccttccactgggtcaagcaggcacctgggaaaggcctgaagtggatgggctggatcaacacttactcggggaagccaacctacgccgatgatttcaagggaagattcgtgtttagcctggaggactccgcccggacagctaacctccaaatctccaaccttaagaacgaggacactgcgacctacttctgcgcgcggggagcctattacggttatcgcgactggttcacctactggggacagggcaccctcgtgaccgtgtcctccaccactaccccagcaccgaggccacccaccccggctcctaccatcgcctcccagcctctgtccctgcgtccggaggcatgtagacccgcagctggtggggccgtgcatacccggggtcttgacttcgcctgcgatatctacatttgggcccctctggctggtacttgcggggtcctgctgctttcactcgtgatcactctttactgtaagcgcggtcggaagaagctgctgtacatctttaagcaacccttcatgaggcctgtgcagactactcaagaggaggacggctgttcatgccggttcccagaggaggaggaaggcggctgcgaactgcgcgtgaaattcagccgcagcgcagatgctccagcctacaagcaggggcagaaccagctctacaacgaactcaatcttggtcggagagaggagtacgacgtgctggacaagcggagaggacgggacccagaaatgggcgggaagccgcgcagaaagaatccccaagagggcctgtacaacgagctccaaaaggataagatggcagaagcctatagcgagattggtatgaaaggggaacgcagaagaggcaaaggccacgacggactgtaccagggactcagcaccgccaccaaggacacctatgacgctcttcacatgcaggccctgccgcctcgg

SEQ ID NO: 865 - protein, 499 aa, synthetic construct
  REGION 1..499: note = source = /note="Description of Artificial Sequence: Synthetic polypeptide"
MALPVTALLLPLALLLHAARPDIVMTQTPSSQAVSAGEKVTMSCKSSQSLLYSENKKNYLAWYQQKPGQSPKLLIYWASTRESGVPDRFIGSGSGTDFTLTISSVQAEDLAVYYCQQYYNFPPWTFGGGTKLELKGGGGSGGGGSGGGGSGGGGSQIQLVQSGPELKKPGESVKISCKTSEYTFTDYAFHWVKQAPGKGLKWMGWINTYSGKPTYADDFKGRFVFSLEDSARTANLQISNLKNEDTATYFCARGAYYGYRDWFTYWGQGTLVTVSSTTTPAPRPPTPAPTIASQPLSLRPEACRPAAGGAVHTRGLDFACDIYIWAPLAGTCGVLLLSLVITLYCKRGRKKLLYIFKQPFMRPVQTTQEEDGCSCRFPEEEEGGCELRVKFSRSADAPAYKQGQNQLYNELNLGRREEYDVLDKRRGRDPEMGGKPRRKNPQEGLYNELQKDKMAEAYSEIGMKGERRRGKGHDGLYQGLSTATKDTYDALHMQALPPR

SEQ ID NO: 866 - protein, 248 aa, synthetic construct
  REGION 1..248: note = source = /note="Description of Artificial Sequence: Synthetic polypeptide"
QVVLTQPKSVSTSLESTVKLSCKINSGNIGSYFIHWYQQHEGRSPTTMIYRDDKRPHGVPDRFSGSIDSSSNSAFLTINNVQTEDEAIYFCHSYDSGINIVFGGGTKLTVLGGGGSGGGGSGGGGSGGGGSEVQLVESGGGLVQPGRSLKLSCLASGFTFSKYGMNWIRQAPGKGLEWVASISSTSIYIYYADTVKGRFTISRENAKNTLYLQMTSLRSEDTALYYCARHDYSSYSYWGQGVMVTVSS

SEQ ID NO: 867 - DNA, 744 bp, synthetic construct
  misc_feature 1..744: note = source = /note="Description of Artificial Sequence: Synthetic polynucleotide"
  source 1..744: mol_type = other DNA
caagtcgtgctgacgcaacccaagtccgtgagcaccagcctggagagcaccgtgaagctcagctgcaagattaactcgggcaacattgggtcctacttcatccattggtaccagcagcacgaaggacggtcccctaccactatgatctaccgggacgacaagcggccgcacggagtgccggacagattctcgggttcaatcgattcctcatctaactcggcgtttctcaccatcaacaacgtgcagaccgaggacgaagcgatctacttctgccactcctacgactcgggtattaacattgtgttcggcggcgggactaagctgacagtgctgggcggtggaggctcaggggggggcggctcgggagggggtggaagcggaggaggaggctccgaggtgcagctcgtcgaatccggtggaggactggtgcagccaggaagatccctgaagctgtcctgtctcgcctcgggcttcactttctccaaatacggcatgaattggattcgccaggcacccggaaaggggctggaatgggtggccagcatcagctcgactagcatctacatctactatgccgataccgtcaagggccgcttcactatctcccgcgagaacgctaagaacaccctttacttgcaaatgacctccctgaggtccgaagataccgccctgtactattgcgcccggcacgactactcatcctactcctactggggacagggagtcatggtgaccgtgtcctcc

SEQ ID NO: 868 - DNA, 837 bp, synthetic construct
  misc_feature 1..837: note = source = /note="Description of Artificial Sequence: Synthetic polynucleotide"
  source 1..837: mol_type = other DNA
atggccctccctgtcaccgccctgctgcttccgctggctcttctgctccacgccgctcggccccaagtcgtgctgacgcaacccaagtccgtgagcaccagcctggagagcaccgtgaagctcagctgcaagattaactcgggcaacattgggtcctacttcatccattggtaccagcagcacgaaggacggtcccctaccactatgatctaccgggacgacaagcggccgcacggagtgccggacagattctcgggttcaatcgattcctcatctaactcggcgtttctcaccatcaacaacgtgcagaccgaggacgaagcgatctacttctgccactcctacgactcgggtattaacattgtgttcggcggcgggactaagctgacagtgctgggcggtggaggctcaggggggggcggctcgggagggggtggaagcggaggaggaggctccgaggtgcagctcgtcgaatccggtggaggactggtgcagccaggaagatccctgaagctgtcctgtctcgcctcgggcttcactttctccaaatacggcatgaattggattcgccaggcacccggaaaggggctggaatgggtggccagcatcagctcgactagcatctacatctactatgccgataccgtcaagggccgcttcactatctcccgcgagaacgctaagaacaccctttacttgcaaatgacctccctgaggtccgaagataccgccctgtactattgcgcccggcacgactactcatcctactcctactggggacagggagtcatggtgaccgtgtcctccggatcgcaccaccatcaccatcatcatcac

SEQ ID NO: 869 - protein, 279 aa, synthetic construct
  REGION 1..279: note = source = /note="Description of Artificial Sequence: Synthetic polypeptide"
MALPVTALLLPLALLLHAARPQVVLTQPKSVSTSLESTVKLSCKINSGNIGSYFIHWYQQHEGRSPTTMIYRDDKRPHGVPDRFSGSIDSSSNSAFLTINNVQTEDEAIYFCHSYDSGINIVFGGGTKLTVLGGGGSGGGGSGGGGSGGGGSEVQLVESGGGLVQPGRSLKLSCLASGFTFSKYGMNWIRQAPGKGLEWVASISSTSIYIYYADTVKGRFTISRENAKNTLYLQMTSLRSEDTALYYCARHDYSSYSYWGQGVMVTVSSGSHHHHHHHH

SEQ ID NO: 870 - DNA, 1476 bp, synthetic construct
  misc_feature 1..1476: note = source = /note="Description of Artificial Sequence: Synthetic polynucleotide"
  source 1..1476: mol_type = other DNA
atggccctccctgtcaccgccctgctgcttccgctggctcttctgctccacgccgctcggccccaagtcgtgctgacgcaacccaagtccgtgagcaccagcctggagagcaccgtgaagctcagctgcaagattaactcgggcaacattgggtcctacttcatccattggtaccagcagcacgaaggacggtcccctaccactatgatctaccgggacgacaagcggccgcacggagtgccggacagattctcgggttcaatcgattcctcatctaactcggcgtttctcaccatcaacaacgtgcagaccgaggacgaagcgatctacttctgccactcctacgactcgggtattaacattgtgttcggcggcgggactaagctgacagtgctgggcggtggaggctcaggggggggcggctcgggagggggtggaagcggaggaggaggctccgaggtgcagctcgtcgaatccggtggaggactggtgcagccaggaagatccctgaagctgtcctgtctcgcctcgggcttcactttctccaaatacggcatgaattggattcgccaggcacccggaaaggggctggaatgggtggccagcatcagctcgactagcatctacatctactatgccgataccgtcaagggccgcttcactatctcccgcgagaacgctaagaacaccctttacttgcaaatgacctccctgaggtccgaagataccgccctgtactattgcgcccggcacgactactcatcctactcctactggggacagggagtcatggtgaccgtgtcctccaccactaccccagcaccgaggccacccaccccggctcctaccatcgcctcccagcctctgtccctgcgtccggaggcatgtagacccgcagctggtggggccgtgcatacccggggtcttgacttcgcctgcgatatctacatttgggcccctctggctggtacttgcggggtcctgctgctttcactcgtgatcactctttactgtaagcgcggtcggaagaagctgctgtacatctttaagcaacccttcatgaggcctgtgcagactactcaagaggaggacggctgttcatgccggttcccagaggaggaggaaggcggctgcgaactgcgcgtgaaattcagccgcagcgcagatgctccagcctacaagcaggggcagaaccagctctacaacgaactcaatcttggtcggagagaggagtacgacgtgctggacaagcggagaggacgggacccagaaatgggcgggaagccgcgcagaaagaatccccaagagggcctgtacaacgagctccaaaaggataagatggcagaagcctatagcgagattggtatgaaaggggaacgcagaagaggcaaaggccacgacggactgtaccagggactcagcaccgccaccaaggacacctatgacgctcttcacatgcaggccctgccgcctcgg

SEQ ID NO: 871 - protein, 492 aa, synthetic construct
  REGION 1..492: note = source = /note="Description of Artificial Sequence: Synthetic polypeptide"
MALPVTALLLPLALLLHAARPQVVLTQPKSVSTSLESTVKLSCKINSGNIGSYFIHWYQQHEGRSPTTMIYRDDKRPHGVPDRFSGSIDSSSNSAFLTINNVQTEDEAIYFCHSYDSGINIVFGGGTKLTVLGGGGSGGGGSGGGGSGGGGSEVQLVESGGGLVQPGRSLKLSCLASGFTFSKYGMNWIRQAPGKGLEWVASISSTSIYIYYADTVKGRFTISRENAKNTLYLQMTSLRSEDTALYYCARHDYSSYSYWGQGVMVTVSSTTTPAPRPPTPAPTIASQPLSLRPEACRPAAGGAVHTRGLDFACDIYIWAPLAGTCGVLLLSLVITLYCKRGRKKLLYIFKQPFMRPVQTTQEEDGCSCRFPEEEEGGCELRVKFSRSADAPAYKQGQNQLYNELNLGRREEYDVLDKRRGRDPEMGGKPRRKNPQEGLYNELQKDKMAEAYSEIGMKGERRRGKGHDGLYQGLSTATKDTYDALHMQALPPR

SEQ ID NO: 872 - protein, 251 aa, synthetic construct
  REGION 1..251: note = source = /note="Description of Artificial Sequence: Synthetic polypeptide"
DVQMTQSPSLLSASVGDAVTINCKASQNINRYLNWYQQKLGEGPRLLIYSANSLQTGIPSRFSGSGSGADFTLTITSPQPEDVATYFCLQHNSWPLTFGSGTKLEIKGGGGSGGGGSGGGGSGGGGSQVTLKESGPGILQPSQTLSLTCTFTRFSLSTYGMSVGWIRQPSGKGLEWLADIWWDDDKHYNPSLKNRLTISKDTSKNQAFLKITNVDTADTATYYCARSSTTDGIVTYVMDVWGQGASVTVSS

SEQ ID NO: 873 - DNA, 753 bp, synthetic construct
  misc_feature 1..753: note = source = /note="Description of Artificial Sequence: Synthetic polynucleotide"
  source 1..753: mol_type = other DNA
gacgtgcagatgactcagtccccgtcgctcctgtccgcctccgtcggcgacgccgtgactattaactgcaaggcgtcccagaacatcaatcggtacctgaactggtaccagcaaaaactgggagaagggccgagacttctcatctactccgccaactccctgcaaactggcatcccgtcgaggttcagcggatcaggctctggtgccgacttcactttgaccatcacgagccctcagcccgaagatgtggccacctacttctgcctccaacacaactcctggcccctgacctttggttcgggcaccaagctggagatcaagggcggtggaggctcaggggggggcggctcgggagggggtggaagcggaggaggaggctcccaagtcacgctgaaggaatcgggccctggaattctgcagccaagccagaccctctcgcttacttgcaccttcacccgcttctcactgtccacttacggaatgtccgtgggatggattcggcagcccagcggaaagggtttggagtggctggccgacatttggtgggatgacgacaagcattacaaccctagcctgaagaatcggctcaccatcagcaaagacacctccaagaaccaggcgttcctgaagatcaccaacgtggataccgccgacactgcaacatactattgtgcccgctcctcaaccaccgatgggatcgtgacctacgtgatggacgtctggggccagggagcttccgtgaccgtgtcctcc

SEQ ID NO: 874 - DNA, 846 bp, synthetic construct
  misc_feature 1..846: note = source = /note="Description of Artificial Sequence: Synthetic polynucleotide"
  source 1..846: mol_type = other DNA
atggccctccctgtcaccgccctgctgcttccgctggctcttctgctccacgccgctcggcccgacgtgcagatgactcagtccccgtcgctcctgtccgcctccgtcggcgacgccgtgactattaactgcaaggcgtcccagaacatcaatcggtacctgaactggtaccagcaaaaactgggagaagggccgagacttctcatctactccgccaactccctgcaaactggcatcccgtcgaggttcagcggatcaggctctggtgccgacttcactttgaccatcacgagccctcagcccgaagatgtggccacctacttctgcctccaacacaactcctggcccctgacctttggttcgggcaccaagctggagatcaagggcggtggaggctcaggggggggcggctcgggagggggtggaagcggaggaggaggctcccaagtcacgctgaaggaatcgggccctggaattctgcagccaagccagaccctctcgcttacttgcaccttcacccgcttctcactgtccacttacggaatgtccgtgggatggattcggcagcccagcggaaagggtttggagtggctggccgacatttggtgggatgacgacaagcattacaaccctagcctgaagaatcggctcaccatcagcaaagacacctccaagaaccaggcgttcctgaagatcaccaacgtggataccgccgacactgcaacatactattgtgcccgctcctcaaccaccgatgggatcgtgacctacgtgatggacgtctggggccagggagcttccgtgaccgtgtcctccggatcgcaccaccatcaccatcatcatcac

SEQ ID NO: 875 - protein, 282 aa, synthetic construct
  REGION 1..282: note = source = /note="Description of Artificial Sequence: Synthetic polypeptide"
MALPVTALLLPLALLLHAARPDVQMTQSPSLLSASVGDAVTINCKASQNINRYLNWYQQKLGEGPRLLIYSANSLQTGIPSRFSGSGSGADFTLTITSPQPEDVATYFCLQHNSWPLTFGSGTKLEIKGGGGSGGGGSGGGGSGGGGSQVTLKESGPGILQPSQTLSLTCTFTRFSLSTYGMSVGWIRQPSGKGLEWLADIWWDDDKHYNPSLKNRLTISKDTSKNQAFLKITNVDTADTATYYCARSSTTDGIVTYVMDVWGQGASVTVSSGSHHHHHHHH

SEQ ID NO: 876 - DNA, 1485 bp, synthetic construct
  misc_feature 1..1485: note = source = /note="Description of Artificial Sequence: Synthetic polynucleotide"
  source 1..1485: mol_type = other DNA
atggccctccctgtcaccgccctgctgcttccgctggctcttctgctccacgccgctcggcccgacgtgcagatgactcagtccccgtcgctcctgtccgcctccgtcggcgacgccgtgactattaactgcaaggcgtcccagaacatcaatcggtacctgaactggtaccagcaaaaactgggagaagggccgagacttctcatctactccgccaactccctgcaaactggcatcccgtcgaggttcagcggatcaggctctggtgccgacttcactttgaccatcacgagccctcagcccgaagatgtggccacctacttctgcctccaacacaactcctggcccctgacctttggttcgggcaccaagctggagatcaagggcggtggaggctcaggggggggcggctcgggagggggtggaagcggaggaggaggctcccaagtcacgctgaaggaatcgggccctggaattctgcagccaagccagaccctctcgcttacttgcaccttcacccgcttctcactgtccacttacggaatgtccgtgggatggattcggcagcccagcggaaagggtttggagtggctggccgacatttggtgggatgacgacaagcattacaaccctagcctgaagaatcggctcaccatcagcaaagacacctccaagaaccaggcgttcctgaagatcaccaacgtggataccgccgacactgcaacatactattgtgcccgctcctcaaccaccgatgggatcgtgacctacgtgatggacgtctggggccagggagcttccgtgaccgtgtcctccaccactaccccagcaccgaggccacccaccccggctcctaccatcgcctcccagcctctgtccctgcgtccggaggcatgtagacccgcagctggtggggccgtgcatacccggggtcttgacttcgcctgcgatatctacatttgggcccctctggctggtacttgcggggtcctgctgctttcactcgtgatcactctttactgtaagcgcggtcggaagaagctgctgtacatctttaagcaacccttcatgaggcctgtgcagactactcaagaggaggacggctgttcatgccggttcccagaggaggaggaaggcggctgcgaactgcgcgtgaaattcagccgcagcgcagatgctccagcctacaagcaggggcagaaccagctctacaacgaactcaatcttggtcggagagaggagtacgacgtgctggacaagcggagaggacgggacccagaaatgggcgggaagccgcgcagaaagaatccccaagagggcctgtacaacgagctccaaaaggataagatggcagaagcctatagcgagattggtatgaaaggggaacgcagaagaggcaaaggccacgacggactgtaccagggactcagcaccgccaccaaggacacctatgacgctcttcacatgcaggccctgccgcctcgg

SEQ ID NO: 877 - protein, 495 aa, synthetic construct
  REGION 1..495: note = source = /note="Description of Artificial Sequence: Synthetic polypeptide"
MALPVTALLLPLALLLHAARPDVQMTQSPSLLSASVGDAVTINCKASQNINRYLNWYQQKLGEGPRLLIYSANSLQTGIPSRFSGSGSGADFTLTITSPQPEDVATYFCLQHNSWPLTFGSGTKLEIKGGGGSGGGGSGGGGSGGGGSQVTLKESGPGILQPSQTLSLTCTFTRFSLSTYGMSVGWIRQPSGKGLEWLADIWWDDDKHYNPSLKNRLTISKDTSKNQAFLKITNVDTADTATYYCARSSTTDGIVTYVMDVWGQGASVTVSSTTTPAPRPPTPAPTIASQPLSLRPEACRPAAGGAVHTRGLDFACDIYIWAPLAGTCGVLLLSLVITLYCKRGRKKLLYIFKQPFMRPVQTTQEEDGCSCRFPEEEEGGCELRVKFSRSADAPAYKQGQNQLYNELNLGRREEYDVLDKRRGRDPEMGGKPRRKNPQEGLYNELQKDKMAEAYSEIGMKGERRRGKGHDGLYQGLSTATKDTYDALHMQALPPR

SEQ ID NO: 878 - protein, 250 aa, synthetic construct
  REGION 1..250: note = source = /note="Description of Artificial Sequence: Synthetic polypeptide"
DIQMTQSPSFLSASVGDRVTINCKASQNINRYLNWYQQKLGEAPKLLIYNANSLQTGIPSRFSGSGSGTDFTLTISSLQPADVATYFCLQHNSRPLTFGSGTILEIKGGGGSGGGGSGGGGSGGGGSQVTLKESGPGLLQPSQTLSLTCTFAGFSLNTHGMGVGWIRQPSGKGLEWLANIWWDDDKYYNPSLKNRLTMSKDTSNNQAFLKITNVDTADTATYYCARIEGSPVVTTVFDYWGQGVMVTVSS

SEQ ID NO: 879 - DNA, 750 bp, synthetic construct
  misc_feature 1..750: note = source = /note="Description of Artificial Sequence: Synthetic polynucleotide"
  source 1..750: mol_type = other DNA
gacatccaaatgacccagtcacctagctttctgtcggcctcggtcggcgacagagtgaccattaactgcaaagcgtcccagaacatcaaccgctacctgaattggtaccagcagaagctgggggaagccccgaagctgctgatctacaacgcgaacagcctccagactggtattccttcccggttctccgggagcggctcgggtaccgatttcaccctcaccatctcctcccttcaacccgctgacgtggccacctacttctgcttgcaacataattctcggcctctgaccttcggaagcggcactatcctcgagatcaagggcggtggaggctcaggggggggcggctcgggagggggtggaagcggaggaggaggctcccaagtcactcttaaggaatccgggccaggactgttgcagccgagccagaccctgtccctcacttgtaccttcgccggcttttcactgaacacccacggaatgggcgtgggatggattaggcagccctcgggaaagggactggagtggctggccaacatttggtgggacgacgacaagtattacaacccgagcctcaagaaccgcctgactatgtccaaggatacctccaacaaccaggccttcctgaaaatcactaacgtggataccgctgacaccgcaacgtactactgcgcccggatcgaaggttcccccgtcgtgacaactgtgttcgactactggggacagggcgtgatggtgaccgtgtcctcc

SEQ ID NO: 880 - DNA, 843 bp, synthetic construct
  misc_feature 1..843: note = source = /note="Description of Artificial Sequence: Synthetic polynucleotide"
  source 1..843: mol_type = other DNA
atggccctccctgtcaccgccctgctgcttccgctggctcttctgctccacgccgctcggcccgacatccaaatgacccagtcacctagctttctgtcggcctcggtcggcgacagagtgaccattaactgcaaagcgtcccagaacatcaaccgctacctgaattggtaccagcagaagctgggggaagccccgaagctgctgatctacaacgcgaacagcctccagactggtattccttcccggttctccgggagcggctcgggtaccgatttcaccctcaccatctcctcccttcaacccgctgacgtggccacctacttctgcttgcaacataattctcggcctctgaccttcggaagcggcactatcctcgagatcaagggcggtggaggctcaggggggggcggctcgggagggggtggaagcggaggaggaggctcccaagtcactcttaaggaatccgggccaggactgttgcagccgagccagaccctgtccctcacttgtaccttcgccggcttttcactgaacacccacggaatgggcgtgggatggattaggcagccctcgggaaagggactggagtggctggccaacatttggtgggacgacgacaagtattacaacccgagcctcaagaaccgcctgactatgtccaaggatacctccaacaaccaggccttcctgaaaatcactaacgtggataccgctgacaccgcaacgtactactgcgcccggatcgaaggttcccccgtcgtgacaactgtgttcgactactggggacagggcgtgatggtgaccgtgtcctccggatcgcaccaccatcaccatcatcatcac

SEQ ID NO: 881 - protein, 281 aa, synthetic construct
  REGION 1..281: note = source = /note="Description of Artificial Sequence: Synthetic polypeptide"
MALPVTALLLPLALLLHAARPDIQMTQSPSFLSASVGDRVTINCKASQNINRYLNWYQQKLGEAPKLLIYNANSLQTGIPSRFSGSGSGTDFTLTISSLQPADVATYFCLQHNSRPLTFGSGTILEIKGGGGSGGGGSGGGGSGGGGSQVTLKESGPGLLQPSQTLSLTCTFAGFSLNTHGMGVGWIRQPSGKGLEWLANIWWDDDKYYNPSLKNRLTMSKDTSNNQAFLKITNVDTADTATYYCARIEGSPVVTTVFDYWGQGVMVTVSSGSHHHHHHHH

SEQ ID NO: 882 - DNA, 1482 bp, synthetic construct
  misc_feature 1..1482: note = source = /note="Description of Artificial Sequence: Synthetic polynucleotide"
  source 1..1482: mol_type = other DNA
atggccctccctgtcaccgccctgctgcttccgctggctcttctgctccacgccgctcggcccgacatccaaatgacccagtcacctagctttctgtcggcctcggtcggcgacagagtgaccattaactgcaaagcgtcccagaacatcaaccgctacctgaattggtaccagcagaagctgggggaagccccgaagctgctgatctacaacgcgaacagcctccagactggtattccttcccggttctccgggagcggctcgggtaccgatttcaccctcaccatctcctcccttcaacccgctgacgtggccacctacttctgcttgcaacataattctcggcctctgaccttcggaagcggcactatcctcgagatcaagggcggtggaggctcaggggggggcggctcgggagggggtggaagcggaggaggaggctcccaagtcactcttaaggaatccgggccaggactgttgcagccgagccagaccctgtccctcacttgtaccttcgccggcttttcactgaacacccacggaatgggcgtgggatggattaggcagccctcgggaaagggactggagtggctggccaacatttggtgggacgacgacaagtattacaacccgagcctcaagaaccgcctgactatgtccaaggatacctccaacaaccaggccttcctgaaaatcactaacgtggataccgctgacaccgcaacgtactactgcgcccggatcgaaggttcccccgtcgtgacaactgtgttcgactactggggacagggcgtgatggtgaccgtgtcctccaccactaccccagcaccgaggccacccaccccggctcctaccatcgcctcccagcctctgtccctgcgtccggaggcatgtagacccgcagctggtggggccgtgcatacccggggtcttgacttcgcctgcgatatctacatttgggcccctctggctggtacttgcggggtcctgctgctttcactcgtgatcactctttactgtaagcgcggtcggaagaagctgctgtacatctttaagcaacccttcatgaggcctgtgcagactactcaagaggaggacggctgttcatgccggttcccagaggaggaggaaggcggctgcgaactgcgcgtgaaattcagccgcagcgcagatgctccagcctacaagcaggggcagaaccagctctacaacgaactcaatcttggtcggagagaggagtacgacgtgctggacaagcggagaggacgggacccagaaatgggcgggaagccgcgcagaaagaatccccaagagggcctgtacaacgagctccaaaaggataagatggcagaagcctatagcgagattggtatgaaaggggaacgcagaagaggcaaaggccacgacggactgtaccagggactcagcaccgccaccaaggacacctatgacgctcttcacatgcaggccctgccgcctcgg

SEQ ID NO: 883 - protein, 494 aa, synthetic construct
  REGION 1..494: note = source = /note="Description of Artificial Sequence: Synthetic polypeptide"
MALPVTALLLPLALLLHAARPDIQMTQSPSFLSASVGDRVTINCKASQNINRYLNWYQQKLGEAPKLLIYNANSLQTGIPSRFSGSGSGTDFTLTISSLQPADVATYFCLQHNSRPLTFGSGTILEIKGGGGSGGGGSGGGGSGGGGSQVTLKESGPGLLQPSQTLSLTCTFAGFSLNTHGMGVGWIRQPSGKGLEWLANIWWDDDKYYNPSLKNRLTMSKDTSNNQAFLKITNVDTADTATYYCARIEGSPVVTTVFDYWGQGVMVTVSSTTTPAPRPPTPAPTIASQPLSLRPEACRPAAGGAVHTRGLDFACDIYIWAPLAGTCGVLLLSLVITLYCKRGRKKLLYIFKQPFMRPVQTTQEEDGCSCRFPEEEEGGCELRVKFSRSADAPAYKQGQNQLYNELNLGRREEYDVLDKRRGRDPEMGGKPRRKNPQEGLYNELQKDKMAEAYSEIGMKGERRRGKGHDGLYQGLSTATKDTYDALHMQALPPR

SEQ ID NO: 884 - protein, 248 aa, synthetic construct
  REGION 1..248: note = source = /note="Description of Artificial Sequence: Synthetic polypeptide"
KIVLTQSPTITAASPGEKVTITCLASSRVSNIYWYQQKSGASPKLLIYSTSSLASGVPYRFSGSGSGTSYSLTINTMEAEDAATYYCHQWSSNPWTFGGGTKLELKGGGGSGGGGSGGGGSGGGGSQVTLKESGPGMLQPSKTLSLTCSFSGFSLSTSGMVVSWIRQPSGKSLEWLAAIAWDGDKYYNPSLKSRVTVSKDTSNTQVFLRITSVDIADTATYYCTRRDYDVGYYYFDFWGQGVMVTVSS

SEQ ID NO: 885 - DNA, 744 bp, synthetic construct
  misc_feature 1..744: note = source = /note="Description of Artificial Sequence: Synthetic polynucleotide"
  source 1..744: mol_type = other DNA
aagattgtgctgacccagagccccactattaccgccgcctccccgggggaaaaggtcaccatcacttgtctggcgtcctcacgcgtgtcgaatatctactggtatcagcagaagtccggcgccagccccaagctgctgatctactcgacctcctccctcgcgtcgggagtgccttaccggttttctggctcgggaagcggaaccagctactccttgaccatcaacaccatggaagccgaggacgctgccacttactactgccaccagtggtcgagcaacccttggactttcggtggaggcaccaaactcgagctcaagggcggtggaggctcaggggggggcggctcgggagggggtggaagcggaggaggaggctcccaagtcaccctgaaagaatcgggtcccggaatgctgcagccatccaagacgctgtcccttacatgctccttctccgggttcagcctctcaacttccgggatggtggtgtcatggatcagacagccgagcggaaagtccctggagtggctggcggccatcgcatgggatggcgataagtactacaacccgagcctgaagtcaagggtcactgtgtccaaggacacctccaacacccaagtgttccttcggatcacctccgtggacattgctgacaccgccacctattactgcactcgccgggactacgacgtgggctactactacttcgatttctggggacagggtgtcatggtgaccgtgtcctcc

SEQ ID NO: 886 - DNA, 837 bp, synthetic construct
  misc_feature 1..837: note = source = /note="Description of Artificial Sequence: Synthetic polynucleotide"
  source 1..837: mol_type = other DNA
atggccctccctgtcaccgccctgctgcttccgctggctcttctgctccacgccgctcggcccaagattgtgctgacccagagccccactattaccgccgcctccccgggggaaaaggtcaccatcacttgtctggcgtcctcacgcgtgtcgaatatctactggtatcagcagaagtccggcgccagccccaagctgctgatctactcgacctcctccctcgcgtcgggagtgccttaccggttttctggctcgggaagcggaaccagctactccttgaccatcaacaccatggaagccgaggacgctgccacttactactgccaccagtggtcgagcaacccttggactttcggtggaggcaccaaactcgagctcaagggcggtggaggctcaggggggggcggctcgggagggggtggaagcggaggaggaggctcccaagtcaccctgaaagaatcgggtcccggaatgctgcagccatccaagacgctgtcccttacatgctccttctccgggttcagcctctcaacttccgggatggtggtgtcatggatcagacagccgagcggaaagtccctggagtggctggcggccatcgcatgggatggcgataagtactacaacccgagcctgaagtcaagggtcactgtgtccaaggacacctccaacacccaagtgttccttcggatcacctccgtggacattgctgacaccgccacctattactgcactcgccgggactacgacgtgggctactactacttcgatttctggggacagggtgtcatggtgaccgtgtcctccggatcgcaccaccatcaccatcatcatcac

SEQ ID NO: 887 - protein, 279 aa, synthetic construct
  REGION 1..279: note = source = /note="Description of Artificial Sequence: Synthetic polypeptide"
MALPVTALLLPLALLLHAARPKIVLTQSPTITAASPGEKVTITCLASSRVSNIYWYQQKSGASPKLLIYSTSSLASGVPYRFSGSGSGTSYSLTINTMEAEDAATYYCHQWSSNPWTFGGGTKLELKGGGGSGGGGSGGGGSGGGGSQVTLKESGPGMLQPSKTLSLTCSFSGFSLSTSGMVVSWIRQPSGKSLEWLAAIAWDGDKYYNPSLKSRVTVSKDTSNTQVFLRITSVDIADTATYYCTRRDYDVGYYYFDFWGQGVMVTVSSGSHHHHHHHH

SEQ ID NO: 888 - DNA, 1476 bp, synthetic construct
  misc_feature 1..1476: note = source = /note="Description of Artificial Sequence: Synthetic polynucleotide"
  source 1..1476: mol_type = other DNA
atggccctccctgtcaccgccctgctgcttccgctggctcttctgctccacgccgctcggcccaagattgtgctgacccagagccccactattaccgccgcctccccgggggaaaaggtcaccatcacttgtctggcgtcctcacgcgtgtcgaatatctactggtatcagcagaagtccggcgccagccccaagctgctgatctactcgacctcctccctcgcgtcgggagtgccttaccggttttctggctcgggaagcggaaccagctactccttgaccatcaacaccatggaagccgaggacgctgccacttactactgccaccagtggtcgagcaacccttggactttcggtggaggcaccaaactcgagctcaagggcggtggaggctcaggggggggcggctcgggagggggtggaagcggaggaggaggctcccaagtcaccctgaaagaatcgggtcccggaatgctgcagccatccaagacgctgtcccttacatgctccttctccgggttcagcctctcaacttccgggatggtggtgtcatggatcagacagccgagcggaaagtccctggagtggctggcggccatcgcatgggatggcgataagtactacaacccgagcctgaagtcaagggtcactgtgtccaaggacacctccaacacccaagtgttccttcggatcacctccgtggacattgctgacaccgccacctattactgcactcgccgggactacgacgtgggctactactacttcgatttctggggacagggtgtcatggtgaccgtgtcctccaccactaccccagcaccgaggccacccaccccggctcctaccatcgcctcccagcctctgtccctgcgtccggaggcatgtagacccgcagctggtggggccgtgcatacccggggtcttgacttcgcctgcgatatctacatttgggcccctctggctggtacttgcggggtcctgctgctttcactcgtgatcactctttactgtaagcgcggtcggaagaagctgctgtacatctttaagcaacccttcatgaggcctgtgcagactactcaagaggaggacggctgttcatgccggttcccagaggaggaggaaggcggctgcgaactgcgcgtgaaattcagccgcagcgcagatgctccagcctacaagcaggggcagaaccagctctacaacgaactcaatcttggtcggagagaggagtacgacgtgctggacaagcggagaggacgggacccagaaatgggcgggaagccgcgcagaaagaatccccaagagggcctgtacaacgagctccaaaaggataagatggcagaagcctatagcgagattggtatgaaaggggaacgcagaagaggcaaaggccacgacggactgtaccagggactcagcaccgccaccaaggacacctatgacgctcttcacatgcaggccctgccgcctcgg

SEQ ID NO: 889 - protein, 492 aa, synthetic construct
  REGION 1..492: note = source = /note="Description of Artificial Sequence: Synthetic polypeptide"
MALPVTALLLPLALLLHAARPKIVLTQSPTITAASPGEKVTITCLASSRVSNIYWYQQKSGASPKLLIYSTSSLASGVPYRFSGSGSGTSYSLTINTMEAEDAATYYCHQWSSNPWTFGGGTKLELKGGGGSGGGGSGGGGSGGGGSQVTLKESGPGMLQPSKTLSLTCSFSGFSLSTSGMVVSWIRQPSGKSLEWLAAIAWDGDKYYNPSLKSRVTVSKDTSNTQVFLRITSVDIADTATYYCTRRDYDVGYYYFDFWGQGVMVTVSSTTTPAPRPPTPAPTIASQPLSLRPEACRPAAGGAVHTRGLDFACDIYIWAPLAGTCGVLLLSLVITLYCKRGRKKLLYIFKQPFMRPVQTTQEEDGCSCRFPEEEEGGCELRVKFSRSADAPAYKQGQNQLYNELNLGRREEYDVLDKRRGRDPEMGGKPRRKNPQEGLYNELQKDKMAEAYSEIGMKGERRRGKGHDGLYQGLSTATKDTYDALHMQALPPR

SEQ ID NO: 890 - protein, 247 aa, synthetic construct
  REGION 1..247: note = source = /note="Description of Artificial Sequence: Synthetic polypeptide"
NIQLTQSPSRLSASVGDRVTLSCKGSQNINNYLAWYQQKLGEAPKLLIYNTNNLQTGIPSRFSGSGSGTDYTFTISGLQPEDVATYFCCQYNNGNTFGAGTKLELKGGGGSGGGGSGGGGSGGGGSQIQLVQSGPELKKPGESVKISCKASGNTVTGYAMHWVRQAPGKGLKWMGWINTYSGKPTYADDFKGRCVFSLEASASTAHLQISNLKNEDTATYFCARSTYYGYKDWFAYWGQGTLVTVSS

SEQ ID NO: 891 - DNA, 741 bp, synthetic construct
  misc_feature 1..741: note = source = /note="Description of Artificial Sequence: Synthetic polynucleotide"
  source 1..741: mol_type = other DNA
aacatccaactgactcagagccccagccggctgtccgcctccgtgggggacagggtcacactgagctgcaagggttctcagaacatcaacaactacctcgcgtggtaccagcagaagctgggagaggcccccaagctgctcatctacaacaccaacaatctgcaaactggcattccatcgagattctcaggatcagggtccggtaccgactacaccttcacgatttcgggacttcagcctgaggatgtggccacctacttctgctgtcagtacaacaacggcaacaccttcggtgctggcaccaagctggaactcaaaggcggtggaggctcaggggggggcggctcgggagggggtggaagcggaggaggaggctcccaaattcagttggtgcagtccggcccggagctgaagaagcctggagaatccgtgaagatctcgtgcaaagcttccgggaacaccgtgaccggatacgcaatgcactgggtccgccaggcaccgggaaagggactgaagtggatggggtggatcaacacctacagcggaaagccgacttacgccgatgactttaagggacgctgtgtgttctccctggaagcgtccgcctcgactgcccatcttcaaatctccaacctgaagaatgaggacaccgccacttacttctgcgcccggagcacctattacggctacaaggactggttcgcgtattggggccagggcactctcgtgaccgtgtcctcc

SEQ ID NO: 892 - DNA, 834 bp, synthetic construct
  misc_feature 1..834: note = source = /note="Description of Artificial Sequence: Synthetic polynucleotide"
  source 1..834: mol_type = other DNA
atggccctccctgtcaccgccctgctgcttccgctggctcttctgctccacgccgctcggcccaacatccaactgactcagagccccagccggctgtccgcctccgtgggggacagggtcacactgagctgcaagggttctcagaacatcaacaactacctcgcgtggtaccagcagaagctgggagaggcccccaagctgctcatctacaacaccaacaatctgcaaactggcattccatcgagattctcaggatcagggtccggtaccgactacaccttcacgatttcgggacttcagcctgaggatgtggccacctacttctgctgtcagtacaacaacggcaacaccttcggtgctggcaccaagctggaactcaaaggcggtggaggctcaggggggggcggctcgggagggggtggaagcggaggaggaggctcccaaattcagttggtgcagtccggcccggagctgaagaagcctggagaatccgtgaagatctcgtgcaaagcttccgggaacaccgtgaccggatacgcaatgcactgggtccgccaggcaccgggaaagggactgaagtggatggggtggatcaacacctacagcggaaagccgacttacgccgatgactttaagggacgctgtgtgttctccctggaagcgtccgcctcgactgcccatcttcaaatctccaacctgaagaatgaggacaccgccacttacttctgcgcccggagcacctattacggctacaaggactggttcgcgtattggggccagggcactctcgtgaccgtgtcctccggatcgcaccaccatcaccatcatcatcac

SEQ ID NO: 893 - protein, 278 aa, synthetic construct
  REGION 1..278: note = source = /note="Description of Artificial Sequence: Synthetic polypeptide"
MALPVTALLLPLALLLHAARPNIQLTQSPSRLSASVGDRVTLSCKGSQNINNYLAWYQQKLGEAPKLLIYNTNNLQTGIPSRFSGSGSGTDYTFTISGLQPEDVATYFCCQYNNGNTFGAGTKLELKGGGGSGGGGSGGGGSGGGGSQIQLVQSGPELKKPGESVKISCKASGNTVTGYAMHWVRQAPGKGLKWMGWINTYSGKPTYADDFKGRCVFSLEASASTAHLQISNLKNEDTATYFCARSTYYGYKDWFAYWGQGTLVTVSSGSHHHHHHHH

SEQ ID NO: 894 - DNA, 1473 bp, synthetic construct
  misc_feature 1..1473: note = source = /note="Description of Artificial Sequence: Synthetic polynucleotide"
  source 1..1473: mol_type = other DNA
atggccctccctgtcaccgccctgctgcttccgctggctcttctgctccacgccgctcggcccaacatccaactgactcagagccccagccggctgtccgcctccgtgggggacagggtcacactgagctgcaagggttctcagaacatcaacaactacctcgcgtggtaccagcagaagctgggagaggcccccaagctgctcatctacaacaccaacaatctgcaaactggcattccatcgagattctcaggatcagggtccggtaccgactacaccttcacgatttcgggacttcagcctgaggatgtggccacctacttctgctgtcagtacaacaacggcaacaccttcggtgctggcaccaagctggaactcaaaggcggtggaggctcaggggggggcggctcgggagggggtggaagcggaggaggaggctcccaaattcagttggtgcagtccggcccggagctgaagaagcctggagaatccgtgaagatctcgtgcaaagcttccgggaacaccgtgaccggatacgcaatgcactgggtccgccaggcaccgggaaagggactgaagtggatggggtggatcaacacctacagcggaaagccgacttacgccgatgactttaagggacgctgtgtgttctccctggaagcgtccgcctcgactgcccatcttcaaatctccaacctgaagaatgaggacaccgccacttacttctgcgcccggagcacctattacggctacaaggactggttcgcgtattggggccagggcactctcgtgaccgtgtcctccaccactaccccagcaccgaggccacccaccccggctcctaccatcgcctcccagcctctgtccctgcgtccggaggcatgtagacccgcagctggtggggccgtgcatacccggggtcttgacttcgcctgcgatatctacatttgggcccctctggctggtacttgcggggtcctgctgctttcactcgtgatcactctttactgtaagcgcggtcggaagaagctgctgtacatctttaagcaacccttcatgaggcctgtgcagactactcaagaggaggacggctgttcatgccggttcccagaggaggaggaaggcggctgcgaactgcgcgtgaaattcagccgcagcgcagatgctccagcctacaagcaggggcagaaccagctctacaacgaactcaatcttggtcggagagaggagtacgacgtgctggacaagcggagaggacgggacccagaaatgggcgggaagccgcgcagaaagaatccccaagagggcctgtacaacgagctccaaaaggataagatggcagaagcctatagcgagattggtatgaaaggggaacgcagaagaggcaaaggccacgacggactgtaccagggactcagcaccgccaccaaggacacctatgacgctcttcacatgcaggccctgccgcctcgg

SEQ ID NO: 895 - protein, 491 aa, synthetic construct
  REGION 1..491: note = source = /note="Description of Artificial Sequence: Synthetic polypeptide"
MALPVTALLLPLALLLHAARPNIQLTQSPSRLSASVGDRVTLSCKGSQNINNYLAWYQQKLGEAPKLLIYNTNNLQTGIPSRFSGSGSGTDYTFTISGLQPEDVATYFCCQYNNGNTFGAGTKLELKGGGGSGGGGSGGGGSGGGGSQIQLVQSGPELKKPGESVKISCKASGNTVTGYAMHWVRQAPGKGLKWMGWINTYSGKPTYADDFKGRCVFSLEASASTAHLQISNLKNEDTATYFCARSTYYGYKDWFAYWGQGTLVTVSSTTTPAPRPPTPAPTIASQPLSLRPEACRPAAGGAVHTRGLDFACDIYIWAPLAGTCGVLLLSLVITLYCKRGRKKLLYIFKQPFMRPVQTTQEEDGCSCRFPEEEEGGCELRVKFSRSADAPAYKQGQNQLYNELNLGRREEYDVLDKRRGRDPEMGGKPRRKNPQEGLYNELQKDKMAEAYSEIGMKGERRRGKGHDGLYQGLSTATKDTYDALHMQALPPR

SEQ ID NO: 896 - protein, 17 aa, synthetic construct
  REGION 1..17: note = source = /note="Description of Artificial Sequence: Synthetic peptide"
GIYYDSYKKSYADSVKG

SEQ ID NO: 897 - protein, 17 aa, synthetic construct
  REGION 1..17: note = source = /note="Description of Artificial Sequence: Synthetic peptide"
WINTYSGKPTYADDFKG

SEQ ID NO: 898 - protein, 17 aa, synthetic construct
  REGION 1..17: note = source = /note="Description of Artificial Sequence: Synthetic peptide"
SISSTSIYIYYADTVKG

SEQ ID NO: 899 - protein, 16 aa, synthetic construct
  REGION 1..16: note = source = /note="Description of Artificial Sequence: Synthetic peptide"
DIWWDDDKHYNPSLKN

SEQ ID NO: 900 - protein, 16 aa, synthetic construct
  REGION 1..16: note = source = /note="Description of Artificial Sequence: Synthetic peptide"
NIWWDDDKYYNPSLKN

SEQ ID NO: 901 - protein, 16 aa, synthetic construct
  REGION 1..16: note = source = /note="Description of Artificial Sequence: Synthetic peptide"
AIAWDGDKYYNPSLKS

SEQ ID NO: 902 - protein, 17 aa, synthetic construct
  REGION 1..17: note = source = /note="Description of Artificial Sequence: Synthetic peptide"
WINTYSGKPTYADDFKG

SEQ ID NO: 903 - protein, 5 aa, synthetic construct
  REGION 1..5: note = source = /note="Description of Artificial Sequence: Synthetic peptide"
DWFTY

SEQ ID NO: 904 - protein, 8 aa, synthetic construct
  REGION 1..8: note = source = /note="Description of Artificial Sequence: Synthetic peptide"
HDYSSYSY

SEQ ID NO: 905 - protein, 11 aa, synthetic construct
  REGION 1..11: note = source = /note="Description of Artificial Sequence: Synthetic peptide"
HDHNNVDWFAY

SEQ ID NO: 906 - protein, 14 aa, synthetic construct
  REGION 1..14: note = source = /note="Description of Artificial Sequence: Synthetic peptide"
SSTTDGIVTYVMDV

SEQ ID NO: 907 - protein, 12 aa, synthetic construct
  REGION 1..12: note = source = /note="Description of Artificial Sequence: Synthetic peptide"
SAYYGYKDYFDY

SEQ ID NO: 908 - protein, 13 aa, synthetic construct
  REGION 1..13: note = source = /note="Description of Artificial Sequence: Synthetic peptide"
IEGSPVVTTVFDY

SEQ ID NO: 909 - protein, 12 aa, synthetic construct
  REGION 1..12: note = source = /note="Description of Artificial Sequence: Synthetic peptide"
RDYDVGYYYFDF

SEQ ID NO: 910 - protein, 5 aa, synthetic construct
  REGION 1..5: note = source = /note="Description of Artificial Sequence: Synthetic peptide"
DWFAY

SEQ ID NO: 911 - protein, 11 aa, synthetic construct
  REGION 1..11: note = source = /note="Description of Artificial Sequence: Synthetic peptide"
HDHNNVDWFAY

SEQ ID NO: 912 - protein, 12 aa, synthetic construct
  REGION 1..12: note = source = /note="Description of Artificial Sequence: Synthetic peptide"
SAYYGYKDYFDY

SEQ ID NO: 913 - protein, 12 aa, synthetic construct
  REGION 1..12: note = source = /note="Description of Artificial Sequence: Synthetic peptide"
GAYYGYRDWFTY

SEQ ID NO: 914 - protein, 8 aa, synthetic construct
  REGION 1..8: note = source = /note="Description of Artificial Sequence: Synthetic peptide"
HDYSSYSY

SEQ ID NO: 915 - protein, 14 aa, synthetic construct
  REGION 1..14: note = source = /note="Description of Artificial Sequence: Synthetic peptide"
SSTTDGIVTYVMDV

SEQ ID NO: 916 - protein, 13 aa, synthetic construct
  REGION 1..13: note = source = /note="Description of Artificial Sequence: Synthetic peptide"
IEGSPVVTTVFDY

SEQ ID NO: 917 - protein, 12 aa, synthetic construct
  REGION 1..12: note = source = /note="Description of Artificial Sequence: Synthetic peptide"
RDYDVGYYYFDF

SEQ ID NO: 918 - protein, 12 aa, synthetic construct
  REGION 1..12: note = source = /note="Description of Artificial Sequence: Synthetic peptide"
STYYGYKDWFAY

SEQ ID NO: 919 - protein, 17 aa, synthetic construct
  REGION 1..17: note = source = /note="Description of Artificial Sequence: Synthetic peptide"
KSSQSLLYSENKKNYLA

SEQ ID NO: 920 - protein, 13 aa, synthetic construct
  REGION 1..13: note = source = /note="Description of Artificial Sequence: Synthetic peptide"
KINSGNIGSYFIH

SEQ ID NO: 921 - protein, 17 aa, synthetic construct
  REGION 1..17: note = source = /note="Description of Artificial Sequence: Synthetic peptide"
KSSQSLLYSENKKNYLA

SEQ ID NO: 922 - protein, 11 aa, synthetic construct
  REGION 1..11: note = source = /note="Description of Artificial Sequence: Synthetic peptide"
KASQNINRYLN

SEQ ID NO: 923 - protein, 11 aa, synthetic construct
  REGION 1..11: note = source = /note="Description of Artificial Sequence: Synthetic peptide"
QASQNINKYIA

SEQ ID NO: 924 - protein, 11 aa, synthetic construct
  REGION 1..11: note = source = /note="Description of Artificial Sequence: Synthetic peptide"
KASQNINRYLN

SEQ ID NO: 925 - protein, 10 aa, synthetic construct
  REGION 1..10: note = source = /note="Description of Artificial Sequence: Synthetic peptide"
LASSRVSNIY

SEQ ID NO: 926 - protein, 11 aa, synthetic construct
  REGION 1..11: note = source = /note="Description of Artificial Sequence: Synthetic peptide"
KGSQNINNYLA

SEQ ID NO: 927 - protein, 17 aa, synthetic construct
  REGION 1..17: note = source = /note="Description of Artificial Sequence: Synthetic peptide"
KSSQSLLYSENKKNYLA

SEQ ID NO: 928 - protein, 11 aa, synthetic construct
  REGION 1..11: note = source = /note="Description of Artificial Sequence: Synthetic peptide"
QASQNINKYIA

SEQ ID NO: 929 - protein, 17 aa, synthetic construct
  REGION 1..17: note = source = /note="Description of Artificial Sequence: Synthetic peptide"
KSSQSLLYSENKKNYLA

SEQ ID NO: 930 - protein, 13 aa, synthetic construct
  REGION 1..13: note = source = /note="Description of Artificial Sequence: Synthetic peptide"
KINSGNIGSYFIH

SEQ ID NO: 931 - protein, 11 aa, synthetic construct
  REGION 1..11: note = source = /note="Description of Artificial Sequence: Synthetic peptide"
KASQNINRYLN

SEQ ID NO: 932 - protein, 11 aa, synthetic construct
  REGION 1..11: note = source = /note="Description of Artificial Sequence: Synthetic peptide"
KASQNINRYLN

SEQ ID NO: 933 - protein, 10 aa, synthetic construct
  REGION 1..10: note = source = /note="Description of Artificial Sequence: Synthetic peptide"
LASSRVSNIY

SEQ ID NO: 934 - protein, 11 aa, synthetic construct
  REGION 1..11: note = source = /note="Description of Artificial Sequence: Synthetic peptide"
KGSQNINNYLA

SEQ ID NO: 935 - protein, 7 aa, synthetic construct
  REGION 1..7: note = source = /note="Description of Artificial Sequence: Synthetic peptide"
WASTRES

SEQ ID NO: 936 - protein, 7 aa, synthetic construct
  REGION 1..7: note = source = /note="Description of Artificial Sequence: Synthetic peptide"
RDDKRPH

SEQ ID NO: 937 - protein, 7 aa, synthetic construct
  REGION 1..7: note = source = /note="Description of Artificial Sequence: Synthetic peptide"
WASTRES

SEQ ID NO: 938 - protein, 7 aa, synthetic construct
  REGION 1..7: note = source = /note="Description of Artificial Sequence: Synthetic peptide"
SANSLQT

SEQ ID NO: 939 - protein, 7 aa, synthetic construct
  REGION 1..7: note = source = /note="Description of Artificial Sequence: Synthetic peptide"
YTSTLES

SEQ ID NO: 940 - protein, 7 aa, synthetic construct
  REGION 1..7: note = source = /note="Description of Artificial Sequence: Synthetic peptide"
NANSLQT

SEQ ID NO: 941 - protein, 7 aa, synthetic construct
  REGION 1..7: note = source = /note="Description of Artificial Sequence: Synthetic peptide"
STSSLAS

SEQ ID NO: 942 - protein, 7 aa, synthetic construct
  REGION 1..7: note = source = /note="Description of Artificial Sequence: Synthetic peptide"
NTNNLQT

SEQ ID NO: 943 - protein, 7 aa, synthetic construct
  REGION 1..7: note = source = /note="Description of Artificial Sequence: Synthetic peptide"
WASTRES

SEQ ID NO: 944 - protein, 7 aa, synthetic construct
  REGION 1..7: note = source = /note="Description of Artificial Sequence: Synthetic peptide"
YTSTLES

SEQ ID NO: 945 - protein, 7 aa, synthetic construct
  REGION 1..7: note = source = /note="Description of Artificial Sequence: Synthetic peptide"
WASTRES

SEQ ID NO: 946 - protein, 7 aa, synthetic construct
  REGION 1..7: note = source = /note="Description of Artificial Sequence: Synthetic peptide"
RDDKRPH

SEQ ID NO: 947 - protein, 7 aa, synthetic construct
  REGION 1..7: note = source = /note="Description of Artificial Sequence: Synthetic peptide"
SANSLQT

SEQ ID NO: 948 - protein, 7 aa, synthetic construct
  REGION 1..7: note = source = /note="Description of Artificial Sequence: Synthetic peptide"
NANSLQT

SEQ ID NO: 949 - protein, 7 aa, synthetic construct
  REGION 1..7: note = source = /note="Description of Artificial Sequence: Synthetic peptide"
STSSLAS

SEQ ID NO: 950 - protein, 7 aa, synthetic construct
  REGION 1..7: note = source = /note="Description of Artificial Sequence: Synthetic peptide"
NTNNLQT

SEQ ID NO: 951 - protein, 10 aa, synthetic construct
  REGION 1..10: note = source = /note="Description of Artificial Sequence: Synthetic peptide"
QQYYNFPPWT

SEQ ID NO: 952 - protein, 10 aa, synthetic construct
  REGION 1..10: note = source = /note="Description of Artificial Sequence: Synthetic peptide"
HSYDSGINIV

SEQ ID NO: 953 - protein, 8 aa, synthetic construct
  REGION 1..8: note = source = /note="Description of Artificial Sequence: Synthetic peptide"
QQYYNFPT

SEQ ID NO: 954 - protein, 9 aa, synthetic construct
  REGION 1..9: note = source = /note="Description of Artificial Sequence: Synthetic peptide"
LQHNSWPLT

SEQ ID NO: 955 - protein, 9 aa, synthetic construct
  REGION 1..9: note = source = /note="Description of Artificial Sequence: Synthetic peptide"
LQYDDLPYT

SEQ ID NO: 956 - protein, 9 aa, synthetic construct
  REGION 1..9: note = source = /note="Description of Artificial Sequence: Synthetic peptide"
LQHNSRPLT

SEQ ID NO: 957 - protein, 9 aa, synthetic construct
  REGION 1..9: note = source = /note="Description of Artificial Sequence: Synthetic peptide"
HQWSSNPWT

SEQ ID NO: 958 - protein, 8 aa, synthetic construct
  REGION 1..8: note = source = /note="Description of Artificial Sequence: Synthetic peptide"
CQYNNGNT

SEQ ID NO: 959 - protein, 8 aa, synthetic construct
  REGION 1..8: note = source = /note="Description of Artificial Sequence: Synthetic peptide"
QQYYNFPT

SEQ ID NO: 960 - protein, 9 aa, synthetic construct
  REGION 1..9: note = source = /note="Description of Artificial Sequence: Synthetic peptide"
LQYDDLPYT

SEQ ID NO: 961 - protein, 10 aa, synthetic construct
  REGION 1..10: note = source = /note="Description of Artificial Sequence: Synthetic peptide"
QQYYNFPPWT

SEQ ID NO: 962 - protein, 10 aa, synthetic construct
  REGION 1..10: note = source = /note="Description of Artificial Sequence: Synthetic peptide"
HSYDSGINIV

SEQ ID NO: 963 - protein, 9 aa, synthetic construct
  REGION 1..9: note = source = /note="Description of Artificial Sequence: Synthetic peptide"
LQHNSWPLT

SEQ ID NO: 964 - protein, 9 aa, synthetic construct
  REGION 1..9: note = source = /note="Description of Artificial Sequence: Synthetic peptide"
LQHNSRPLT

SEQ ID NO: 965 - protein, 9 aa, synthetic construct
  REGION 1..9: note = source = /note="Description of Artificial Sequence: Synthetic peptide"
HQWSSNPWT

SEQ ID NO: 966 - protein, 8 aa, synthetic construct
  REGION 1..8: note = source = /note="Description of Artificial Sequence: Synthetic peptide"
CQYNNGNT

SEQ ID NO: 967 - protein, 119 aa, synthetic construct
  REGION 1..119: note = source = /note="Description of Artificial Sequence: Synthetic polypeptide"
QIQLVQSGPELKKPGESVKISCKTSEYTFTDYAFHWVKQAPGKGLKWMGWINTYSGKPTYADDFKGRFVFSLEDSARTANLQISNLKNEDTATYFCARGAYYGYRDWFTYWGQGTLVTV

SEQ ID NO: 968 - protein, 115 aa, synthetic construct
  REGION 1..115: note = source = /note="Description of Artificial Sequence: Synthetic polypeptide"
EVQLVESGGGLVQPGRSLKLSCLASGFTFSKYGMNWIRQAPGKGLEWVASISSTSIYIYYADTVKGRFTISRENAKNTLYLQMTSLRSEDTALYYCARHDYSSYSYWGQGVMVTV

SEQ ID NO: 969 - protein, 117 aa, synthetic construct
  REGION 1..117: note = source = /note="Description of Artificial Sequence: Synthetic polypeptide"
EVQLVESGGGLVQPGRSLKLSCAASGFTFRDYYMAWVRQAPKKGLEWVASISYEGNPYYGDSVKGRFTISRNNAKSTLYLQMNSLRSEDTATYYCARHDHNNVDWFAYWGQGTLVTV

SEQ ID NO: 970 - protein, 122 aa, synthetic construct
  REGION 1..122: note = source = /note="Description of Artificial Sequence: Synthetic polypeptide"
QVTLKESGPGILQPSQTLSLTCTFTRFSLSTYGMSVGWIRQPSGKGLEWLADIWWDDDKHYNPSLKNRLTISKDTSKNQAFLKITNVDTADTATYYCARSSTTDGIVTYVMDVWGQGASVTV

SEQ ID NO: 971 - protein, 119 aa, synthetic construct
  REGION 1..119: note = source = /note="Description of Artificial Sequence: Synthetic polypeptide"
EVQLVESGGGLVQPGTSLKLSCVASGFTFSSSGMQWIRQAPKKGLEWISGIYYDSYKKSYADSVKGRFTISRDNSKNTLYLEMNSLRSEDTATYYCAKSAYYGYKDYFDYWGQGVMVTV

SEQ ID NO: 972 - protein, 121 aa, synthetic construct
  REGION 1..121: note = source = /note="Description of Artificial Sequence: Synthetic polypeptide"
QVTLKESGPGLLQPSQTLSLTCTFAGFSLNTHGMGVGWIRQPSGKGLEWLANIWWDDDKYYNPSLKNRLTMSKDTSNNQAFLKITNVDTADTATYYCARIEGSPVVTTVFDYWGQGVMVTV

SEQ ID NO: 973 - protein, 120 aa, synthetic construct
  REGION 1..120: note = source = /note="Description of Artificial Sequence: Synthetic polypeptide"
QVTLKESGPGMLQPSKTLSLTCSFSGFSLSTSGMVVSWIRQPSGKSLEWLAAIAWDGDKYYNPSLKSRVTVSKDTSNTQVFLRITSVDIADTATYYCTRRDYDVGYYYFDFWGQGVMVTV

SEQ ID NO: 974 - protein, 119 aa, synthetic construct
  REGION 1..119: note = source = /note="Description of Artificial Sequence: Synthetic polypeptide"
QIQLVQSGPELKKPGESVKISCKASGNTVTGYAMHWVRQAPGKGLKWMGWINTYSGKPTYADDFKGRCVFSLEASASTAHLQISNLKNEDTATYFCARSTYYGYKDWFAYWGQGTLVTV

SEQ ID NO: 975 - protein, 117 aa, synthetic construct; identical to SEQ ID NO: 969
  REGION 1..117: note = source = /note="Description of Artificial Sequence: Synthetic polypeptide"

SEQ ID NO: 976 - protein, 119 aa, synthetic construct; identical to SEQ ID NO: 971
  REGION 1..119: note = source = /note="Description of Artificial Sequence: Synthetic polypeptide"

SEQ ID NO: 977 - protein, 119 aa, synthetic construct; identical to SEQ ID NO: 967
  REGION 1..119: note = source = /note="Description of Artificial Sequence: Synthetic polypeptide"

SEQ ID NO: 978 - protein, 115 aa, synthetic construct; identical to SEQ ID NO: 968
  REGION 1..115: note = source = /note="Description of Artificial Sequence: Synthetic polypeptide"

SEQ ID NO: 979 - protein, 122 aa, synthetic construct; identical to SEQ ID NO: 970
  REGION 1..122: note = source = /note="Description of Artificial Sequence: Synthetic polypeptide"

SEQ ID NO: 980 - protein, 121 aa, synthetic construct; identical to SEQ ID NO: 972
  REGION 1..121: note = source = /note="Description of Artificial Sequence: Synthetic polypeptide"

SEQ ID NO: 981 - protein, 120 aa, synthetic construct; identical to SEQ ID NO: 973
  REGION 1..120: note = source = /note="Description of Artificial Sequence: Synthetic polypeptide"

SEQ ID NO: 982 - protein, 119 aa, synthetic construct; identical to SEQ ID NO: 974
  REGION 1..119: note = source = /note="Description of Artificial Sequence: Synthetic polypeptide"

SEQ ID NO: 983 - protein, 119 aa, synthetic construct
  REGION 1..119: note = source = /note="Description of Artificial Sequence: Synthetic polypeptide"
QVQLVQSGAEVKKPGASVKVSCKASGFTFRDYYMAWVRQAPGQGLEWMGSISYEGNPYYGDSVKGRVTMTRDNSTSTLYMELSSLRSEDTAVYYCARHDHNNVDWFAYWGQGTLVTVSS

SEQ ID NO: 984 - protein, 119 aa, synthetic construct
  REGION 1..119: note = source = /note="Description of Artificial Sequence: Synthetic polypeptide"
EVQLVQSGAEVKKPGESLKISCKGSGFTFRDYYMAWVRQMPGKGLEWMGSISYEGNPYYGDSVKGQVTISRDNSISTLYLQWSSLKASDTAMYYCARHDHNNVDWFAYWGQGTLVTVSS

SEQ ID NO: 985 - protein, 119 aa, synthetic construct
  REGION 1..119: note = source = /note="Description of Artificial Sequence: Synthetic polypeptide"
QVQLVESGGGVVQPGRSLRLSCAASGFTFRDYYMAWVRQAPGKGLEWVASISYEGNPYYGDSVKGRFTISRDNAKSTLYLQMSSLRAEDTAVYYCARHDHNNVDWFAYWGQGTLVTVSS

SEQ ID NO: 986 - protein, 119 aa, synthetic construct
  REGION 1..119: note = source = /note="Description of Artificial Sequence: Synthetic polypeptide"
QVQLVQSGAEVKKPGASVKVSCKASGFTFRDYYMAWVRQAPGQRLEWMGSISYEGNPYYGDSVKGRVTITRDNSASTLYMELSSLRSEDTAVYYCARHDHNNVDWFAYWGQGTLVTVSS

SEQ ID NO: 987 - protein, 114 aa, synthetic construct
  REGION 1..114: note = source = /note="Description of Artificial Sequence: Synthetic polypeptide"
DIVMTQTPSSQAVSAGEKVTMSCKSSQSLLYSENKKNYLAWYQQKPGQSPKLLIYWASTRESGVPDRFIGSGSGTDFTLTISSVQAEDLAVYYCQQYYNFPPWTFGGGTKLELK

SEQ ID NO: 988 - protein, 111 aa, synthetic construct
  REGION 1..111: note = source = /note="Description of Artificial Sequence: Synthetic polypeptide"
QVVLTQPKSVSTSLESTVKLSCKINSGNIGSYFIHWYQQHEGRSPTTMIYRDDKRPHGVPDRFSGSIDSSSNSAFLTINNVQTEDEAIYFCHSYDSGINIVFGGGTKLTVL

SEQ ID NO: 989 - protein, 112 aa, synthetic construct
  REGION 1..112: note = source = /note="Description of Artificial Sequence: Synthetic polypeptide"
DIVMTQTPSSQAVSAGEKVTMSCKSSQSLLYSENKKNYLAWYQQKPGQSPKLLIFWASTRESGVPDRFIGSGSGTDFTLTISSVQAEDLAVYYCQQYYNFPTFGSGTKLEIK

SEQ ID NO: 990 - protein, 107 aa, synthetic construct
  REGION 1..107: note = source = /note="Description of Artificial Sequence: Synthetic polypeptide"
DVQMTQSPSLLSASVGDAVTINCKASQNINRYLNWYQQKLGEGPRLLIYSANSLQTGIPSRFSGSGSGADFTLTITSPQPEDVATYFCLQHNSWPLTFGSGTKLEIK

SEQ ID NO: 991 - protein, 107 aa, synthetic construct
  REGION 1..107: note = source = /note="Description of Artificial Sequence: Synthetic polypeptide"
DIQMTQSPPSLSASLGDKVTITCQASQNINKYIAWYQQKPGKAPRLLIRYTSTLESGTPSRFSGSGSGRDYSFSISNVESGDVASYYCLQYDDLPYTFGPGTKLELK

SEQ ID NO: 992 - protein, 107 aa, synthetic construct
  REGION 1..107: note = source = /note="Description of Artificial Sequence: Synthetic polypeptide"
DIQMTQSPSFLSASVGDRVTINCKASQNINRYLNWYQQKLGEAPKLLIYNANSLQTGIPSRFSGSGSGTDFTLTISSLQPADVATYFCLQHNSRPLTFGSGTILEIK

SEQ ID NO: 993 - protein, 106 aa, synthetic construct
  REGION 1..106: note = source = /note="Description of Artificial Sequence: Synthetic polypeptide"
KIVLTQSPTITAASPGEKVTITCLASSRVSNIYWYQQKSGASPKLLIYSTSSLASGVPYRFSGSGSGTSYSLTINTMEAEDAATYYCHQWSSNPWTFGGGTKLELK

SEQ ID NO: 994 - protein, 106 aa, synthetic construct
  REGION 1..106: note = source = /note="Description of Artificial Sequence: Synthetic polypeptide"
NIQLTQSPSRLSASVGDRVTLSCKGSQNINNYLAWYQQKLGEAPKLLIYNTNNLQTGIPSRFSGSGSGTDYTFTISGLQPEDVATYFCCQYNNGNTFGAGTKLELK

SEQ ID NO: 995 - protein, 112 aa, synthetic construct; identical to SEQ ID NO: 989
  REGION 1..112: note = source = /note="Description of Artificial Sequence: Synthetic polypeptide"

SEQ ID NO: 996 - protein, 107 aa, synthetic construct; identical to SEQ ID NO: 991
  REGION 1..107: note = source = /note="Description of Artificial Sequence: Synthetic polypeptide"

SEQ ID NO: 997 - protein, 114 aa, synthetic construct; identical to SEQ ID NO: 987
  REGION 1..114: note = source = /note="Description of Artificial Sequence: Synthetic polypeptide"

SEQ ID NO: 998 - protein, 111 aa, synthetic construct; identical to SEQ ID NO: 988
  REGION 1..111: note = source = /note="Description of Artificial Sequence: Synthetic polypeptide"

SEQ ID NO: 999 - protein, 107 aa, synthetic construct; identical to SEQ ID NO: 990
  REGION 1..107: note = source = /note="Description of Artificial Sequence: Synthetic polypeptide"

SEQ ID NO: 1000 - protein, 107 aa, synthetic construct; identical to SEQ ID NO: 992
  REGION 1..107: note = source = /note="Description of Artificial Sequence: Synthetic polypeptide"

SEQ ID NO: 1001 - protein, 106 aa, synthetic construct; identical to SEQ ID NO: 993
  REGION 1..106: note = source = /note="Description of Artificial Sequence: Synthetic polypeptide"

SEQ ID NO: 1002 - protein, 106 aa, synthetic construct; identical to SEQ ID NO: 994
  REGION 1..106: note = source = /note="Description of Artificial Sequence: Synthetic polypeptide"

SEQ ID NO: 1003 - protein, 112 aa, synthetic construct
  REGION 1..112: note = source = /note="Description of Artificial Sequence: Synthetic polypeptide"
DIQMTQSPSSLSASVGDRVTITCKSSQSLLYSENKKNYLAWYQQKPGKVPKLLIFWASTRESGVPSRFSGSGSGTDFTLTISSLQPEDVATYYCQQYYNFPTFGQGTKLEIK

SEQ ID NO: 1004 - protein, 112 aa, synthetic construct
  REGION 1..112: note = source = /note="Description of Artificial Sequence: Synthetic polypeptide"
EIVMTQSPATLSLSPGERATLSCKSSQSLLYSENKKNYLAWYQQKPGQAPRLLIFWASTRESGIPARFSGSGSGTDFTLTISSLQPEDLAVYYCQQYYNFPTFGQGTKLEIK

SEQ ID NO: 1005 - protein, 112 aa, synthetic construct
  REGION 1..112: note = source = /note="Description of Artificial Sequence: Synthetic polypeptide"
DIVMTQTPLSLSVTPGQPVSMSCKSSQSLLYSENKKNYLAWYLQKPGQSPQLLIFWASTRESGVPDRFSGSGSGTDFTLKISRVEAEDVGVYYCQQYYNFPTFGQGTKLEIK

SEQ ID NO: 1006 - protein, 10 aa, synthetic construct
  REGION 1..10: note = source = /note="Description of Artificial Sequence: Synthetic peptide"
GYTFTDYYMH

SEQ ID NO: 1007 - protein, 10 aa, synthetic construct
  REGION 1..10: note = source = /note="Description of Artificial Sequence: Synthetic peptide"
GYTFTGYYMH

SEQ ID NO: 1008 - protein, 10 aa, synthetic construct
  REGION 1..10: note = source = /note="Description of Artificial Sequence: Synthetic peptide"
GYTFTGYYMH

SEQ ID NO: 1009 - protein, 10 aa, synthetic construct
  REGION 1..10: note = source = /note="Description of Artificial Sequence: Synthetic peptide"
GYIFTGYYIH

SEQ ID NO: 1010 - protein, 17 aa, synthetic construct
  REGION 1..17: note = source = /note="Description of Artificial Sequence: Synthetic peptide"
WINPNSGDTNYAQKFQG

SEQ ID NO: 1011 - protein, 17 aa, synthetic construct
  REGION 1..17: note = source = /note="Description of Artificial Sequence: Synthetic peptide"
WINPNSGGTNYAQKFQG

SEQ ID NO: 1012 - protein, 17 aa, synthetic construct
  REGION 1..17: note = source = /note="Description of Artificial Sequence: Synthetic peptide"
WINPNSGGTNYAQKFQG

SEQ ID NO: 1013 - protein, 17 aa, synthetic construct
  REGION 1..17: note = source = /note="Description of Artificial Sequence: Synthetic peptide"
WINPNSGGTNYAQKFQG

SEQ ID NO: 1014 - protein, 12 aa, synthetic construct
  REGION 1..12: note = source = /note="Description of Artificial Sequence: Synthetic peptide"
DMNILATVPFDI

SEQ ID NO: 1015 - protein, 12 aa, synthetic construct
  REGION 1..12: note = source = /note="Description of Artificial Sequence: Synthetic peptide"
DMNILATVPFDI

SEQ ID NO: 1016 - protein, 12 aa, synthetic construct
  REGION 1..12: note = source = /note="Description of Artificial Sequence: Synthetic peptide"
DMNILATVPFDI

SEQ ID NO: 1017 - protein, 12 aa, synthetic construct
  REGION 1..12: note = source = /note="Description of Artificial Sequence: Synthetic peptide"
DMNILATVPFDI

SEQ ID NO: 1018 - protein, 11 aa, synthetic construct
  REGION 1..11: note = source = /note="Description of Artificial Sequence: Synthetic peptide"
RASQSISSYLN

SEQ ID NO: 1019 - protein, 11 aa, synthetic construct
  REGION 1..11: note = source = /note="Description of Artificial Sequence: Synthetic peptide"
RASQSISTYLN

SEQ ID NO: 1020 - protein, 11 aa, synthetic construct
  REGION 1..11: note = source = /note="Description of Artificial Sequence: Synthetic peptide"
RASQSISSYLN

SEQ ID NO: 1021 - protein, 11 aa, synthetic construct
  REGION 1..11: note = source = /note="Description of Artificial Sequence: Synthetic peptide"
RASQSISSYLN

SEQ ID NO: 1022 - protein, 7 aa, synthetic construct
  REGION 1..7: note = source = /note="Description of Artificial Sequence: Synthetic peptide"
AASSLQS

SEQ ID NO: 1023 - protein, 7 aa, synthetic construct
  REGION 1..7: note = source = /note="Description of Artificial Sequence: Synthetic peptide"
AAFSLQS

SEQ ID NO: 1024 - protein, 7 aa, synthetic construct
  REGION 1..7: note = source = /note="Description of Artificial Sequence: Synthetic peptide"
AASSLQS

SEQ ID NO: 1025 - protein, 7 aa, synthetic construct
  REGION 1..7: note = source = /note="Description of Artificial Sequence: Synthetic peptide"
AASSLQS

SEQ ID NO: 1026 - protein, 9 aa, synthetic construct
  REGION 1..9: note = source = /note="Description of Artificial Sequence: Synthetic peptide"
QQGDSVPLT

SEQ ID NO: 1027 - protein, 9 aa, synthetic construct
  REGION 1..9: note = source = /note="Description of Artificial Sequence: Synthetic peptide"
QQGDSVPLT

SEQ ID NO: 1028 - protein, 9 aa, synthetic construct
  REGION 1..9: note = source = /note="Description of Artificial Sequence: Synthetic peptide"
QQGDSVPLT

SEQ ID NO: 1029 - protein, 9 aa, synthetic construct
  REGION 1..9: note = source = /note="Description of Artificial Sequence: Synthetic peptide"
QQGDSVPLT

SEQ ID NO: 1030 - protein, 10 aa, synthetic construct
  REGION 1..10: note = source = /note="Description of Artificial Sequence: Synthetic peptide"
GYTFTDYYMH

SEQ ID NO: 1031 - protein, 10 aa, synthetic construct
  REGION 1..10: note = source = /note="Description of Artificial Sequence: Synthetic peptide"
GYTFTGYYMH

SEQ ID NO: 1032 - protein, 10 aa, synthetic construct
  REGION 1..10: note = source = /note="Description of Artificial Sequence: Synthetic peptide"
GYIFTGYYIH

SEQ ID NO: 1033 - protein, 10 aa, synthetic construct
  REGION 1..10: note = source = /note="Description of Artificial Sequence: Synthetic peptide"
GYTFTGYYMH

SEQ ID NO: 1034 - protein, 17 aa, synthetic construct
  REGION 1..17: note = source = /note="Description of Artificial Sequence: Synthetic peptide"
WINPNSGDTNYAQKFQG

SEQ ID NO: 1035 - protein, 17 aa, synthetic construct
  REGION 1..17: note = source = /note="Description of Artificial Sequence: Synthetic peptide"
WINPNSGGTNYAQKFQG

SEQ ID NO: 1036 - protein, 17 aa, synthetic construct
  REGION 1..17: note = source = /note="Description of Artificial Sequence: Synthetic peptide"
WINPNSGGTNYAQKFQG

SEQ ID NO: 1037 - protein, 17 aa, synthetic construct
  REGION 1..17: note = source = /note="Description of Artificial Sequence: Synthetic peptide"
WINPNSGGTNYAQKFQG

SEQ ID NO: 1038 - protein, 12 aa, synthetic construct
  REGION 1..12: note = source = /note="Description of Artificial Sequence: Synthetic peptide"
DMNILATVPFDI

SEQ ID NO: 1039 - protein, 12 aa, synthetic construct
  REGION 1..12: note = source = /note="Description of Artificial Sequence: Synthetic peptide"
DMNILATVPFDI

SEQ ID NO: 1040 - protein, 12 aa, synthetic construct
  REGION 1..12: note = source = /note="Description of Artificial Sequence: Synthetic peptide"
DMNILATVPFDI

SEQ ID NO: 1041 - protein, 12 aa, synthetic construct
  REGION 1..12: note = source = /note="Description of Artificial Sequence: Synthetic peptide"
DMNILATVPFDI

SEQ ID NO: 1042 - protein, 11 aa, synthetic construct
  REGION 1..11: note = source = /note="Description of Artificial Sequence: Synthetic peptide"
RASQSISTYLN

SEQ ID NO: 1043 - protein, 11 aa, synthetic construct
  REGION 1..11: note = source = /note="Description of Artificial Sequence: Synthetic peptide"
RASQSISSYLN

SEQ ID NO: 1044 - protein, 11 aa, synthetic construct
  REGION 1..11: note = source = /note="Description of Artificial Sequence: Synthetic peptide"
RASQSISSYLN

SEQ ID NO: 1045 - protein, 11 aa, synthetic construct
  REGION 1..11: note = source = /note="Description of Artificial Sequence: Synthetic peptide"
RASQSISSYLN

SEQ ID NO: 1046 - protein, 7 aa, synthetic construct
  REGION 1..7: note = source = /note="Description of Artificial Sequence: Synthetic peptide"
AASSLQS

SEQ ID NO: 1047 - protein, 7 aa, synthetic construct
  REGION 1..7: note = source = /note="Description of Artificial Sequence: Synthetic peptide"
AAFSLQS

SEQ ID NO: 1048 - protein, 7 aa, synthetic construct
  REGION 1..7: note = source = /note="Description of Artificial Sequence: Synthetic peptide"
AASSLQS

SEQ ID NO: 1049 - protein, 7 aa, synthetic construct
  REGION 1..7: note = source = /note="Description of Artificial Sequence: Synthetic peptide"
AASSLQS

SEQ ID NO: 1050 - protein, 9 aa, synthetic construct
  REGION 1..9: note = source = /note="Description of Artificial Sequence: Synthetic peptide"
QQGDSVPLT

SEQ ID NO: 1051 - protein, 9 aa, synthetic construct
  REGION 1..9: note = source = /note="Description of Artificial Sequence: Synthetic peptide"
QQGDSVPLT

SEQ ID NO: 1052 - protein, 9 aa, synthetic construct
  REGION 1..9: note = source = /note="Description of Artificial Sequence: Synthetic peptide"
QQGDSVPLT

SEQ ID NO: 1053 - protein, 9 aa, synthetic construct
  REGION 1..9: note = source = /note="Description of Artificial Sequence: Synthetic peptide"
QQGDSVPLT

SEQ ID NO: 1054 - protein, 5 aa, synthetic construct
  REGION 1..5: note = source = /note="Description of Artificial Sequence: Synthetic peptide"
GYYMH

SEQ ID NO: 1055 - protein, 5 aa, synthetic construct
  REGION 1..5: note = source = /note="Description of Artificial Sequence: Synthetic peptide"
GYYMH

SEQ ID NO: 1056 - protein, 5 aa, synthetic construct
  REGION 1..5: note = source = /note="Description of Artificial Sequence: Synthetic peptide"
GYYIH

SEQ ID NO: 1057 - protein, 5 aa, synthetic construct
  REGION 1..5: note = source = /note="Description of Artificial Sequence: Synthetic peptide"
DYYMH

SEQ ID NO: 1058 - protein, 17 aa, synthetic construct
  REGION 1..17: note = source = /note="Description of Artificial Sequence: Synthetic peptide"
WINPNSGGTNYAQKFQG

SEQ ID NO: 1059 - protein, 17 aa, synthetic construct
  REGION 1..17: note = source = /note="Description of Artificial Sequence: Synthetic peptide"
WINPNSGGTNYAQKFQG

SEQ ID NO: 1060 - protein, 17 aa, synthetic construct
  REGION 1..17: note = source = /note="Description of Artificial Sequence: Synthetic peptide"
WINPNSGGTNYAQKFQG

SEQ ID NO: 1061 - protein, 17 aa, synthetic construct
  REGION 1..17: note = source = /note="Description of Artificial Sequence: Synthetic peptide"
WINPNSGDTNYAQKFQG

SEQ ID NO: 1062 - protein, 12 aa, synthetic construct
  REGION 1..12: note = source = /note="Description of Artificial Sequence: Synthetic peptide"
DMNILATVPFDI

SEQ ID NO: 1063 - protein, 12 aa, synthetic construct
  REGION 1..12: note = source = /note="Description of Artificial Sequence: Synthetic peptide"
DMNILATVPFDI

SEQ ID NO: 1064 - protein, 12 aa, synthetic construct
  REGION 1..12: note = source = /note="Description of Artificial Sequence: Synthetic peptide"
DMNILATVPFDI

SEQ ID NO: 1065 - protein, 12 aa, synthetic construct
  REGION 1..12: note = source = /note="Description of Artificial Sequence: Synthetic peptide"
DMNILATVPFDI

SEQ ID NO: 1066 - protein, 11 aa, synthetic construct
  REGION 1..11: note = source = /note="Description of Artificial Sequence: Synthetic peptide"
RASQSISTYLN

SEQ ID NO: 1067 - protein, 11 aa, synthetic construct
  REGION 1..11: note = source = /note="Description of Artificial Sequence: Synthetic peptide"
RASQSISSYLN

SEQ ID NO: 1068 - protein, 11 aa, synthetic construct
  REGION 1..11: note = source = /note="Description of Artificial Sequence: Synthetic peptide"
RASQSISSYLN

SEQ ID NO: 1069 - protein, 11 aa, synthetic construct
  REGION 1..11: note = source = /note="Description of Artificial Sequence: Synthetic peptide"
RASQSISSYLN

SEQ ID NO: 1070 - protein, 7 aa, synthetic construct
  REGION 1..7: note = source = /note="Description of Artificial Sequence: Synthetic peptide"
AAFSLQS

SEQ ID NO: 1071 - protein, 7 aa, synthetic construct
  REGION 1..7: note = source = /note="Description of Artificial Sequence: Synthetic peptide"
AASSLQS

SEQ ID NO: 1072 - protein, 7 aa, synthetic construct
  REGION 1..7: note = source = /note="Description of Artificial Sequence: Synthetic peptide"
AASSLQS

SEQ ID NO: 1073 - protein, 7 aa, synthetic construct
  REGION 1..7: note = source = /note="Description of Artificial Sequence: Synthetic peptide"
AASSLQS

SEQ ID NO: 1074 - protein, 9 aa, synthetic construct
  REGION 1..9: note = source = /note="Description of Artificial Sequence: Synthetic peptide"
QQGDSVPLT

SEQ ID NO: 1075 - protein, 9 aa, synthetic construct
  REGION 1..9: note = source = /note="Description of Artificial Sequence: Synthetic peptide"
QQGDSVPLT

SEQ ID NO: 1076 - protein, 9 aa, synthetic construct
  REGION 1..9: note = source = /note="Description of Artificial Sequence: Synthetic peptide"
QQGDSVPLT

SEQ ID NO: 1077 - protein, 9 aa, synthetic construct
  REGION 1..9: note = source = /note="Description of Artificial Sequence: Synthetic peptide"
QQGDSVPLT

SEQ ID NO: 1078 - protein, 7 aa, synthetic construct
  REGION 1..7: note = source = /note="Description of Artificial Sequence: Synthetic peptide"
GYTFTGY

SEQ ID NO: 1079 - protein, 7 aa, synthetic construct
  REGION 1..7: note = source = /note="Description of Artificial Sequence: Synthetic peptide"
GYTFTGY

SEQ ID NO: 1080 - protein, 7 aa, synthetic construct
  REGION 1..7: note = source = /note="Description of Artificial Sequence: Synthetic peptide"
GYIFTGY

SEQ ID NO: 1081 - protein, 7 aa, synthetic construct
  REGION 1..7: note = source = /note="Description of Artificial Sequence: Synthetic peptide"
GYTFTDY

SEQ ID NO: 1082 - protein, 6 aa, synthetic construct
  REGION 1..6: note = source = /note="Description of Artificial Sequence: Synthetic peptide"
NPNSGG

SEQ ID NO: 1083 - protein, 6 aa, synthetic construct
  REGION 1..6: note = source = /note="Description of Artificial Sequence: Synthetic peptide"
NPNSGG

SEQ ID NO: 1084 - protein, 6 aa, synthetic construct
  REGION 1..6: note = source = /note="Description of Artificial Sequence: Synthetic peptide"
NPNSGG

SEQ ID NO: 1085 - protein, 6 aa, synthetic construct
  REGION 1..6: note = source = /note="Description of Artificial Sequence: Synthetic peptide"
NPNSGD

SEQ ID NO: 1086 - protein, 12 aa, synthetic construct
  REGION 1..12: note = source = /note="Description of Artificial Sequence: Synthetic peptide"
DMNILATVPFDI

SEQ ID NO: 1087 - protein, 12 aa, synthetic construct
  REGION 1..12: note = source = /note="Description of Artificial Sequence: Synthetic peptide"
DMNILATVPFDI

SEQ ID NO: 1088 - protein, 12 aa, synthetic construct
  REGION 1..12: note = source = /note="Description of Artificial Sequence: Synthetic peptide"
DMNILATVPFDI

SEQ ID NO: 1089 - protein, 12 aa, synthetic construct
  REGION 1..12: note = source = /note="Description of Artificial Sequence: Synthetic peptide"
DMNILATVPFDI

SEQ ID NO: 1090 - protein, 7 aa, synthetic construct
  REGION 1..7: note = source = /note="Description of Artificial Sequence: Synthetic peptide"
SQSISTY

SEQ ID NO: 1091 - protein, 7 aa, synthetic construct
  REGION 1..7: note = source = /note="Description of Artificial Sequence: Synthetic peptide"
SQSISSY

SEQ ID NO: 1092 - protein, 7 aa, synthetic construct
  REGION 1..7: note = source = /note="Description of Artificial Sequence: Synthetic peptide"
SQSISSY

SEQ ID NO: 1093 - protein, 7 aa, synthetic construct
  REGION 1..7: note = source = /note="Description of Artificial Sequence: Synthetic peptide"
SQSISSY

SEQ ID NO: 1094-1097 - skipped (4 entries)

SEQ ID NO: 1098 - protein, 6 aa, synthetic construct
  REGION 1..6: note = source = /note="Description of Artificial Sequence: Synthetic peptide"
GDSVPL

SEQ ID NO: 1099 - protein, 6 aa, synthetic construct
  REGION 1..6: note = source = /note="Description of Artificial Sequence: Synthetic peptide"
GDSVPL

SEQ ID NO: 1100 - protein, 6 aa, synthetic construct
  REGION 1..6: note = source = /note="Description of Artificial Sequence: Synthetic peptide"
GDSVPL

SEQ ID NO: 1101 - protein, 6 aa, synthetic construct
  REGION 1..6: note = source = /note="Description of Artificial Sequence: Synthetic peptide"
GDSVPL

SEQ ID NO: 1102 - protein, 10 aa, synthetic construct
  REGION 1..10: note = source = /note="Description of Artificial Sequence: Synthetic peptide"
GYTFTSYWMN

SEQ ID NO: 1103 - protein, 17 aa, synthetic construct
  REGION 1..17: note = source = /note="Description of Artificial Sequence: Synthetic peptide"
RIDPYDSETHYNQKFKD

SEQ ID NO: 1104 - protein, 6 aa, synthetic construct
  REGION 1..6: note = source = /note="Description of Artificial Sequence: Synthetic peptide"
GNWDDY

SEQ ID NO: 1105 - protein, 11 aa, synthetic construct
  REGION 1..11: note = source = /note="Description of Artificial Sequence: Synthetic peptide"
RASKSISKDLA

SEQ ID NO: 1106 - protein, 7 aa, synthetic construct
  REGION 1..7: note = source = /note="Description of Artificial Sequence: Synthetic peptide"
SGSTLQS

SEQ ID NO: 1107 - protein, 9 aa, synthetic construct
  REGION 1..9: note = source = /note="Description of Artificial Sequence: Synthetic peptide"
QQHNKYPYT

SEQ ID NO: 1108 - DNA, 762 bp, Homo sapiens
  source 1..762: mol_type = other DNA
gaggtacagctgcagcagtcaggtccaggactggtgaagccctcgcagaccctctcactcacctgtgccatctccggggacagtgtctctagcaacagtgctgcttggaactggatcaggcagtccccatcgagaggccttgagtggctgggaaggacatactacaggtccaagtggtatagtgattatgcagtatctgtgaaaagtcgaataaccatcaacccagacacatccaagaaccagttctccctgcagctgaactctgtgactcccgaggacacggctgtgtattactgtgcaagagatccttacgatttttggagtggttatcctgatgcttttgatatctggggccaagggacaatggtcaccgtctcttcaggtggtggtggcagcggcggcggcggctctggtggtggtggatcccagtctgccctgactcagcctgcctccgtgtctgggtctcctggacagtcgatcaccatctcctgcactggaaccagcagtgacgttggtggttacaactatgtctcctggtaccaacagcacccaggcaaagcccccaaggtcataatttctgaggtcaataatcggccctcaggggtttctcatcgcttctctgggtccaagtctggcaacacggcctccctgaccatctctgggctccaggctgaggacgaggctgattatttctgcagctcatatacaagtggcaggactctttatgtcttcggaactgggagcaaggtcaccgtcctaggt

SEQ ID NO: 1109 - protein, 498 aa, Homo sapiens
MALPVTALLLPLALLLHAARPEVQLQQSGPGLVKPSQTLSLTCAISGDSVSSNSAAWNWIRQSPSRGLEWLGRTYYRSKWYSDYAVSVKSRITINPDTSKNQFSLQLNSVTPEDTAVYYCARDPYDFWSGYPDAFDIWGQGTMVTVSSGGGGSGGGGSGGGGSQSALTQPASVSGSPGQSITISCTGTSSDVGGYNYVSWYQQHPGKAPKVIISEVNNRPSGVSHRFSGSKSGNTASLTISGLQAEDEADYFCSSYTSGRTLYVFGTGSKVTVLGTTTPAPRPPTPAPTIASQPLSLRPEACRPAAGGAVHTRGLDFACDIYIWAPLAGTCGVLLLSLVITLYCKRGRKKLLYIFKQPFMRPVQTTQEEDGCSCRFPEEEEGGCELRVKFSRSADAPAYKQGQNQLYNELNLGRREEYDVLDKRRGRDPEMGGKPRRKNPQEGLYNELQKDKMAEAYSEIGMKGERRRGKGHDGLYQGLSTATKDTYDALHMQALPPR

SEQ ID NO: 1110 - DNA, 1494 bp, Homo sapiens
  source 1..1494: mol_type = other DNA
atggccctccctgtcaccgccctgctgcttccgctggctcttctgctccacgccgctcggcccgaggtacagctgcagcagtcaggtccaggactggtgaagccctcgcagaccctctcactcacctgtgccatctccggggacagtgtctctagcaacagtgctgcttggaactggatcaggcagtccccatcgagaggccttgagtggctgggaaggacatactacaggtccaagtggtatagtgattatgcagtatctgtgaaaagtcgaataaccatcaacccagacacatccaagaaccagttctccctgcagctgaactctgtgactcccgaggacacggctgtgtattactgtgcaagagatccttacgatttttggagtggttatcctgatgcttttgatatctggggccaagggacaatggtcaccgtctcttcaggtggtggtggcagcggcggcggcggctctggtggtggtggatcccagtctgccctgactcagcctgcctccgtgtctgggtctcctggacagtcgatcaccatctcctgcactggaaccagcagtgacgttggtggttacaactatgtctcctggtaccaacagcacccaggcaaagcccccaaggtcataatttctgaggtcaataatcggccctcaggggtttctcatcgcttctctgggtccaagtctggcaacacggcctccctgaccatctctgggctccaggctgaggacgaggctgattatttctgcagctcatatacaagtggcaggactctttatgtcttcggaactgggagcaaggtcaccgtcctaggtaccactaccccagcaccgaggccacccaccccggctcctaccatcgcctcccagcctctgtccctgcgtccggaggcatgtagacccgcagctggtggggccgtgcatacccggggtcttgacttcgcctgcgatatctacatttgggcccctctggctggtacttgcggggtcctgctgctttcactcgtgatcactctttactgtaagcgcggtcggaagaagctgctgtacatctttaagcaacccttcatgaggcctgtgcagactactcaagaggaggacggctgttcatgccggttcccagaggaggaggaaggcggctgcgaactgcgcgtgaaattcagccgcagcgcagatgctccagcctacaagcaggggcagaaccagctctacaacgaactcaatcttggtcggagagaggagtacgacgtgctggacaagcggagaggacgggacccagaaatgggcgggaagccgcgcagaaagaatccccaagagggcctgtacaacgagctccaaaaggataagatggcagaagcctatagcgagattggtatgaaaggggaacgcagaagaggcaaaggccacgacggactgtaccagggactcagcaccgccaccaaggacacctatgacgctcttcacatgcaggccctgccgcctcgg

SEQ ID NO: 1111 - protein, 12 aa, synthetic construct
  REGION 1..12: note = source = /note="Description of Artificial Sequence: Synthetic peptide"
GDSVSSNSAAWN

SEQ ID NO: 1112 - protein, 10 aa, synthetic construct
  REGION 1..10: note = source = /note="Description of Artificial Sequence: Synthetic peptide"
GDSVSSNSAA

SEQ ID NO: 1113 - protein, 18 aa, synthetic construct
  REGION 1..18: note = source = /note="Description of Artificial Sequence: Synthetic peptide"
RTYYRSKWYSDYAVSVKS

SEQ ID NO: 1114 - protein, 9 aa, synthetic construct
  REGION 1..9: note = source = /note="Description of Artificial Sequence: Synthetic peptide"
TYYRSKWYS

SEQ ID NO: 1115 - protein, 15 aa, synthetic construct
  REGION 1..15: note = source = /note="Description of Artificial Sequence: Synthetic peptide"
DPYDFWSGYPDAFDI

SEQ ID NO: 1116 - protein, 17 aa, synthetic construct
  REGION 1..17: note = source = /note="Description of Artificial Sequence: Synthetic peptide"
ARDPYDFWSGYPDAFDI

SEQ ID NO: 1117 - protein, 14 aa, synthetic construct
  REGION 1..14: note = source = /note="Description of Artificial Sequence: Synthetic peptide"
TGTSSDVGGYNYVS

SEQ ID NO: 1118 - protein, 9 aa, synthetic construct
  REGION 1..9: note = source = /note="Description of Artificial Sequence: Synthetic peptide"
SSDVGGYNY

SEQ ID NO: 1119 - protein, 7 aa, synthetic construct
  REGION 1..7: note = source = /note="Description of Artificial Sequence: Synthetic peptide"
EVNNRPS

SEQ ID NO: 1120 - skipped

SEQ ID NO: 1121 - protein, 11 aa, synthetic construct
  REGION 1..11: note = source = /note="Description of Artificial Sequence: Synthetic peptide"
SSYTSGRTLYV

SEQ ID NO: 1122 - protein, 11 aa, synthetic construct
  REGION 1..11: note = source = /note="Description of Artificial Sequence: Synthetic peptide"
SSYTSGRTLYV

SEQ ID NO: 1123 - DNA, 1461 bp, synthetic construct
  misc_feature 1..1461: note = source = /note="Description of Artificial Sequence: Synthetic polynucleotide"
  source 1..1461: mol_type = other DNA
atggccctccctgtcaccgccctgctgcttccgctggctcttctgctccacgccgctcggccccaagtccaactcgtccagtcaggagcggaagtcaagaagcccggagcgtcagtcaaagtgtcatgcaaagcctcgggctacactttcactgggtactacatgcactgggtgcgccaggctccaggacagggactggaatggatgggatggatcaacccgaactccggtggcaccaattacgcccagaagttccaggggagggtgaccatgactcgcgacacgtcgatcagcaccgcatacatggagctgtcaagactccggtccgacgatactgccgtgtactactgcgcacgggacatgaacattctggccaccgtgccttttgacatctggggtcagggaactatggttaccgtgtcctctggtggaggcggctccggcggggggggaagcggaggcggtggaagcgacattcagatgacccagtcgccttcatccctttcggcgagcgtgggagatcgcgtcactatcacttgtcgggcctcgcagtccatctccacctacctcaattggtaccagcagaagccaggaaaagcaccgaatctgctgatctacgccgcgttttccttgcaatcgggagtgccaagcagattcagcggatcgggatcaggcactgatttcaccctcaccatcaactcgctgcaaccggaggatttcgctacgtactattgccaacaaggagacagcgtgccgctcaccttcggcggagggactaagctggaaatcaagaccactaccccagcaccgaggccacccaccccggctcctaccatcgcctcccagcctctgtccctgcgtccggaggcatgtagacccgcagctggtggggccgtgcatacccggggtcttgacttcgcctgcgatatctacatttgggcccctctggctggtacttgcggggtcctgctgctttcactcgtgatcactctttactgtaagcgcggtcggaagaagctgctgtacatctttaagcaacccttcatgaggcctgtgcagactactcaagaggaggacggctgttcatgccggttcccagaggaggaggaaggcggctgcgaactgcgcgtgaaattcagccgcagcgcagatgctccagcctacaagcaggggcagaaccagctctacaacgaactcaatcttggtcggagagaggagtacgacgtgctggacaagcggagaggacgggacccagaaatgggcgggaagccgcgcagaaagaatccccaagagggcctgtacaacgagctccaaaaggataagatggcagaagcctatagcgagattggtatgaaaggggaacgcagaagaggcaaaggccacgacggactgtaccagggactcagcaccgccaccaaggacacctatgacgctcttcacatgcaggccctgccgcctcgg

SEQ ID NO: 1124 - protein, 487 aa, synthetic construct
  REGION 1..487: note = source = /note="Description of Artificial Sequence: Synthetic polypeptide"
MALPVTALLLPLALLLHAARPQVQLVQSGAEVKKPGASVKVSCKASGYTFTGYYMHWVRQAPGQGLEWMGWINPNSGGTNYAQKFQGRVTMTRDTSISTAYMELSRLRSDDTAVYYCARDMNILATVPFDIWGQGTMVTVSSGGGGSGGGGSGGGGSDIQMTQSPSSLSASVGDRVTITCRASQSISTYLNWYQQKPGKAPNLLIYAAFSLQSGVPSRFSGSGSGTDFTLTINSLQPEDFATYYCQQGDSVPLTFGGGTKLEIKTTTPAPRPPTPAPTIASQPLSLRPEACRPAAGGAVHTRGLDFACDIYIWAPLAGTCGVLLLSLVITLYCKRGRKKLLYIFKQPFMRPVQTTQEEDGCSCRFPEEEEGGCELRVKFSRSADAPAYKQGQNQLYNELNLGRREEYDVLDKRRGRDPEMGGKPRRKNPQEGLYNELQKDKMAEAYSEIGMKGERRRGKGHDGLYQGLSTATKDTYDALHMQALPPR

SEQ ID NO: 1125 - protein, 264 aa, synthetic construct
  REGION 1..264: note = source = /note="Description of Artificial Sequence: Synthetic polypeptide"
MALPVTALLLPLALLLHAARPQVQLVQSGAEVKKPGASVKVSCKASGYTFTGYYMHWVRQAPGQGLEWMGWINPNSGGTNYAQKFQGRVTMTRDTSISTAYMELSRLRSDDTAVYYCARDMNILATVPFDIWGQGTMVTVSSGGGGSGGGGSGGGGSDIQMTQSPSSLSASVGDRVTITCRASQSISTYLNWYQQKPGKAPNLLIYAAFSLQSGVPSRFSGSGSGTDFTLTINSLQPEDFATYYCQQGDSVPLTFGGGTKLEIK

SEQ ID NO: 1126 - protein, 121 aa, synthetic construct
  REGION 1..121: note = source = /note="Description of Artificial Sequence: Synthetic polypeptide"
QVQLVQSGAEVKKPGASVKVSCKASGYTFTGYYMHWVRQAPGQGLEWMGWINPNSGGTNYAQKFQGRVTMTRDTSISTAYMELSRLRSDDTAVYYCARDMNILATVPFDIWGQGTMVTVSS

SEQ ID NO: 1127 - protein, 107 aa, synthetic construct
  REGION 1..107: note = source = /note="Description of Artificial Sequence: Synthetic polypeptide"
DIQMTQSPSSLSASVGDRVTITCRASQSISTYLNWYQQKPGKAPNLLIYAAFSLQSGVPSRFSGSGSGTDFTLTINSLQPEDFATYYCQQGDSVPLTFGGGTKLEIK

SEQ ID NO: 1128 - DNA, 1461 bp, synthetic construct
  misc_feature 1..1461: note = source = /note="Description of Artificial Sequence: Synthetic polynucleotide"
  source 1..1461: mol_type = other DNA
atggccctccctgtcaccgccctgctgcttccgctggctcttctgctccacgccgctcggccccaagtgcaactcgtccaaagcggagcggaagtcaagaaacccggagcgagcgtgaaagtgtcctgcaaagcctccggctacacctttacgggctactacatgcactgggtgcgccaggcaccaggacagggtcttgaatggatgggatggatcaaccctaattcgggcggaactaactacgcacagaagttccaggggagagtgactctgactcgggatacctccatctcaactgtctacatggaactctcccgcttgcggtcagatgatacggcagtgtactactgcgcccgcgacatgaatatcctggctaccgtgccgttcgacatctggggacaggggactatggttactgtctcatcgggcggtggaggttcaggaggaggcggctcgggaggcggaggttcggacattcagatgacccagtccccatcctctctgtcggccagcgtcggagatagggtgaccattacctgtcgggcctcgcaaagcatctcctcgtacctcaactggtatcagcaaaagccgggaaaggcgcctaagctgctgatctacgccgcttcgagcttgcaaagcggggtgccatccagattctcgggatcaggctcaggaaccgacttcaccctgaccgtgaacagcctccagccggaggactttgccacttactactgccagcagggagactccgtgccgcttactttcggggggggtacccgcctggagatcaagaccactaccccagcaccgaggccacccaccccggctcctaccatcgcctcccagcctctgtccctgcgtccggaggcatgtagacccgcagctggtggggccgtgcatacccggggtcttgacttcgcctgcgatatctacatttgggcccctctggctggtacttgcggggtcctgctgctttcactcgtgatcactctttactgtaagcgcggtcggaagaagctgctgtacatctttaagcaacccttcatgaggcctgtgcagactactcaagaggaggacggctgttcatgccggttcccagaggaggaggaaggcggctgcgaactgcgcgtgaaattcagccgcagcgcagatgctccagcctacaagcaggggcagaaccagctctacaacgaactcaatcttggtcggagagaggagtacgacgtgctggacaagcggagaggacgggacccagaaatgggcgggaagccgcgcagaaagaatccccaagagggcctgtacaacgagctccaaaaggataagatggcagaagcctatagcgagattggtatgaaaggggaacgcagaagaggcaaaggccacgacggactgtaccagggactcagcaccgccaccaaggacacctatgacgctcttcacatgcaggccctgccgcctcgg

SEQ ID NO: 1129 - protein, 487 aa, synthetic construct
  REGION 1..487: note = source = /note="Description of Artificial Sequence: Synthetic polypeptide"
MALPVTALLLPLALLLHAARPQVQLVQSGAEVKKPGASVKVSCKASGYTFTGYYMHWVRQAPGQGLEWMGWINPNSGGTNYAQKFQGRVTLTRDTSISTVYMELSRLRSDDTAVYYCARDMNILATVPFDIWGQGTMVTVSSGGGGSGGGGSGGGGSDIQMTQSPSSLSASVGDRVTITCRASQSISSYLNWYQQKPGKAPKLLIYAASSLQSGVPSRFSGSGSGTDFTLTVNSLQPEDFATYYCQQGDSVPLTFGGGTRLEIKTTTPAPRPPTPAPTIASQPLSLRPEACRPAAGGAVHTRGLDFACDIYIWAPLAGTCGVLLLSLVITLYCKRGRKKLLYIFKQPFMRPVQTTQEEDGCSCRFPEEEEGGCELRVKFSRSADAPAYKQGQNQLYNELNLGRREEYDVLDKRRGRDPEMGGKPRRKNPQEGLYNELQKDKMAEAYSEIGMKGERRRGKGHDGLYQGLSTATKDTYDALHMQALPPR

SEQ ID NO: 1130 - protein, 264 aa, synthetic construct
  REGION 1..264: note = source = /note="Description of Artificial Sequence: Synthetic polypeptide"
MALPVTALLLPLALLLHAARPQVQLVQSGAEVKKPGASVKVSCKASGYTFTGYYMHWVRQAPGQGLEWMGWINPNSGGTNYAQKFQGRVTLTRDTSISTVYMELSRLRSDDTAVYYCARDMNILATVPFDIWGQGTMVTVSSGGGGSGGGGSGGGGSDIQMTQSPSSLSASVGDRVTITCRASQSISSYLNWYQQKPGKAPKLLIYAASSLQSGVPSRFSGSGSGTDFTLTVNSLQPEDFATYYCQQGDSVPLTFGGGTRLEIK

SEQ ID NO: 1131 - protein, 121 aa, synthetic construct
  REGION 1..121: note = source = /note="Description of Artificial Sequence: Synthetic polypeptide"
QVQLVQSGAEVKKPGASVKVSCKASGYTFTGYYMHWVRQAPGQGLEWMGWINPNSGGTNYAQKFQGRVTLTRDTSISTVYMELSRLRSDDTAVYYCARDMNILATVPFDIWGQGTMVTVSS

SEQ ID NO: 1132 - protein, 107 aa, synthetic construct
  REGION 1..107: note = source = /note="Description of Artificial Sequence: Synthetic polypeptide"
DIQMTQSPSSLSASVGDRVTITCRASQSISSYLNWYQQKPGKAPKLLIYAASSLQSGVPSRFSGSGSGTDFTLTVNSLQPEDFATYYCQQGDSVPLTFGGGTRLEIK

SEQ ID NO: 1133 - DNA, 1461 bp, synthetic construct
  misc_feature 1..1461: note = source = /note="Description of Artificial Sequence: Synthetic polynucleotide"
  source 1..1461: mol_type = other DNA
atggccctccctgtcaccgccctgctgcttccgctggctcttctgctccacgccgctcggccccaagtccaactcgttcaatccggcgcagaagtcaagaagccaggagcatcagtgaaagtgtcctgcaaagcctcaggctacatcttcacgggatactacatccactgggtgcgccaggctccgggccagggccttgagtggatgggctggatcaaccctaactctgggggaaccaactacgctcagaagttccaggggagggtcactatgactcgcgatacctccatctccactgcgtacatggaactctcgggactgagatccgacgatcctgccgtgtactactgcgcccgggacatgaacatcttggcgaccgtgccgtttgacatttggggacagggcaccctcgtcactgtgtcgagcggtggaggaggctcggggggtggcggatcaggagggggaggaagcgacatccagctgactcagagcccatcgtcgttgtccgcgtcggtgggggatagagtgaccattacttgccgcgccagccagagcatctcatcatatctgaattggtaccagcagaagcccggaaaggccccaaaactgctgatctacgctgcaagcagcctccaatcgggagtgccgtcacggttctccgggtccggttcgggaactgactttaccctgaccgtgaattcgctgcaaccggaggatttcgccacgtactactgtcagcaaggagactccgtgccgctgaccttcggtggaggcaccaaggtcgaaatcaagaccactaccccagcaccgaggccacccaccccggctcctaccatcgcctcccagcctctgtccctgcgtccggaggcatgtagacccgcagctggtggggccgtgcatacccggggtcttgacttcgcctgcgatatctacatttgggcccctctggctggtacttgcggggtcctgctgctttcactcgtgatcactctttactgtaagcgcggtcggaagaagctgctgtacatctttaagcaacccttcatgaggcctgtgcagactactcaagaggaggacggctgttcatgccggttcccagaggaggaggaaggcggctgcgaactgcgcgtgaaattcagccgcagcgcagatgctccagcctacaagcaggggcagaaccagctctacaacgaactcaatcttggtcggagagaggagtacgacgtgctggacaagcggagaggacgggacccagaaatgggcgggaagccgcgcagaaagaatccccaagagggcctgtacaacgagctccaaaaggataagatggcagaagcctatagcgagattggtatgaaaggggaacgcagaagaggcaaaggccacgacggactgtaccagggactcagcaccgccaccaaggacacctatgacgctcttcacatgcaggccctgccgcctcgg

SEQ ID NO: 1134 - protein, 487 aa, synthetic construct
  REGION 1..487: note = source = /note="Description of Artificial Sequence: Synthetic polypeptide"
MALPVTALLLPLALLLHAARPQVQLVQSGAEVKKPGASVKVSCKASGYIFTGYYIHWVRQAPGQGLEWMGWINPNSGGTNYAQKFQGRVTMTRDTSISTAYMELSGLRSDDPAVYYCARDMNILATVPFDIWGQGTLVTVSSGGGGSGGGGSGGGGSDIQLTQSPSSLSASVGDRVTITCRASQSISSYLNWYQQKPGKAPKLLIYAASSLQSGVPSRFSGSGSGTDFTLTVNSLQPEDFATYYCQQGDSVPLTFGGGTKVEIKTTTPAPRPPTPAPTIASQPLSLRPEACRPAAGGAVHTRGLDFACDIYIWAPLAGTCGVLLLSLVITLYCKRGRKKLLYIFKQPFMRPVQTTQEEDGCSCRFPEEEEGGCELRVKFSRSADAPAYKQGQNQLYNELNLGRREEYDVLDKRRGRDPEMGGKPRRKNPQEGLYNELQKDKMAEAYSEIGMKGERRRGKGHDGLYQGLSTATKDTYDALHMQALPPR

SEQ ID NO: 1135 - protein, 264 aa, synthetic construct
  REGION 1..264: note = source = /note="Description of Artificial Sequence: Synthetic polypeptide"
MALPVTALLLPLALLLHAARPQVQLVQSGAEVKKPGASVKVSCKASGYIFTGYYIHWVRQAPGQGLEWMGWINPNSGGTNYAQKFQGRVTMTRDTSISTAYMELSGLRSDDPAVYYCARDMNILATVPFDIWGQGTLVTVSSGGGGSGGGGSGGGGSDIQLTQSPSSLSASVGDRVTITCRASQSISSYLNWYQQKPGKAPKLLIYAASSLQSGVPSRFSGSGSGTDFTLTVNSLQPEDFATYYCQQGDSVPLTFGGGTKVEIK

SEQ ID NO: 1136 - protein, 121 aa, synthetic construct
  REGION 1..121: note = source = /note="Description of Artificial Sequence: Synthetic polypeptide"
QVQLVQSGAEVKKPGASVKVSCKASGYIFTGYYIHWVRQAPGQGLEWMGWINPNSGGTNYAQKFQGRVTMTRDTSISTAYMELSGLRSDDPAVYYCARDMNILATVPFDIWGQGTLVTVSS

SEQ ID NO: 1137 - protein, 107 aa, synthetic construct
  REGION 1..107: note = source = /note="Description of Artificial Sequence: Synthetic polypeptide"
DIQLTQSPSSLSASVGDRVTITCRASQSISSYLNWYQQKPGKAPKLLIYAASSLQSGVPSRFSGSGSGTDFTLTVNSLQPEDFATYYCQQGDSVPLTFGGGTKVEIK

SEQ ID NO: 1138 - DNA, 1467 bp, synthetic construct
  misc_feature 1..1467: note = source = /note="Description of Artificial Sequence: Synthetic polynucleotide"
  source 1..1467: mol_type = other DNA
atggccctccctgtcaccgccctgctgcttccgctggctcttctgctccacgccgctcggccccaagtccaactccaacagtcaggcgcagaagtgaaaaagagcggtgcatcggtgaaagtgtcatgcaaagcctcgggctacaccttcactgactactatatgcactggctgcggcaggcaccgggacagggacttgagtggatgggatggatcaacccgaattcaggggacactaactacgcgcagaagttccaggggagagtgaccctgacgagggacacctcaatttcgaccgtctacatggaattgtcgcgcctgagatcggacgatactgctgtgtactactgtgcccgcgacatgaacatcctcgcgactgtgccttttgatatctggggacaggggactatggtcaccgtttcctccgcttccggtggcggaggctcgggaggccgggcctccggtggaggaggcagcgacatccagatgactcagagcccttcctcgctgagcgcctcagtgggagatcgcgtgaccatcacttgccgggccagccagtccatttcgtcctacctcaattggtaccagcagaagccgggaaaggcgcccaagctcttgatctacgctgcgagctccctgcaaagcggggtgccgagccgattctcgggttccggctcgggaaccgacttcactctgaccatctcatccctgcaaccagaggactttgccacctactactgccaacaaggagattctgtcccactgacgttcggcggaggaaccaaggtcgaaatcaagaccactaccccagcaccgaggccacccaccccggctcctaccatcgcctcccagcctctgtccctgcgtccggaggcatgtagacccgcagctggtggggccgtgcatacccggggtcttgacttcgcctgcgatatctacatttgggcccctctggctggtacttgcggggtcctgctgctttcactcgtgatcactctttactgtaagcgcggtcggaagaagctgctgtacatctttaagcaacccttcatgaggcctgtgcagactactcaagaggaggacggctgttcatgccggttcccagaggaggaggaaggcggctgcgaactgcgcgtgaaattcagccgcagcgcagatgctccagcctacaagcaggggcagaaccagctctacaacgaactcaatcttggtcggagagaggagtacgacgtgctggacaagcggagaggacgggacccagaaatgggcgggaagccgcgcagaaagaatccccaagagggcctgtacaacgagctccaaaaggataagatggcagaagcctatagcgagattggtatgaaaggggaacgcagaagaggcaaaggccacgacggactgtaccagggactcagcaccgccaccaaggacacctatgacgctcttcacatgcaggccctgccgcctcgg

SEQ ID NO: 1139 - protein, 336 aa, synthetic construct
  REGION 1..336: note = source = /note="Description of Artificial Sequence: Synthetic polypeptide"
MALPVTALLLPLALLLHAARPQVQLQQSGAEVKKSGASVKVSCKASGYTFTDYYMHWLRQAPGQGLEWMGWINPNSGDTNYAQKFQGRVTLTRDTSISTVYMELSRLRSDDTAVYYCARDMNILATVPFDIWGQGTMVTVSSASGGGGSGGRASGGGGSDIQMTQSPSSLSASVGDRVTITCRASQSISSYLNWYQQKPGKAPKLLIYAASSLQSGVPSRFSGSGSGTDFTLTISSLQPEDFATYYCQQGDSVPLTFGGGTKVEIKTTTPAPRPPTPAPTIASQPLSLRPEACRPAAGGAVHTRGLDFACDIYIWAPLAGTCGVLLLSLVITLYCK

SEQ ID NO: 1140 - protein, 266 aa, synthetic construct
  REGION 1..266: note = source = /note="Description of Artificial Sequence: Synthetic polypeptide"
MALPVTALLLPLALLLHAARPQVQLQQSGAEVKKSGASVKVSCKASGYTFTDYYMHWLRQAPGQGLEWMGWINPNSGDTNYAQKFQGRVTLTRDTSISTVYMELSRLRSDDTAVYYCARDMNILATVPFDIWGQGTMVTVSSASGGGGSGGRASGGGGSDIQMTQSPSSLSASVGDRVTITCRASQSISSYLNWYQQKPGKAPKLLIYAASSLQSGVPSRFSGSGSGTDFTLTISSLQPEDFATYYCQQGDSVPLTFGGGTKVEIK

SEQ ID NO: 1141 - protein, 121 aa, synthetic construct
  REGION 1..121: note = source = /note="Description of Artificial Sequence: Synthetic polypeptide"
QVQLQQSGAEVKKSGASVKVSCKASGYTFTDYYMHWLRQAPGQGLEWMGWINPNSGDTNYAQKFQGRVTLTRDTSISTVYMELSRLRSDDTAVYYCARDMNILATVPFDIWGQGTMVTVSS

SEQ ID NO: 1142 - protein, 107 aa, synthetic construct
  REGION 1..107: note = source = /note="Description of Artificial Sequence: Synthetic polypeptide"
DIQMTQSPSSLSASVGDRVTITCRASQSISSYLNWYQQKPGKAPKLLIYAASSLQSGVPSRFSGSGSGTDFTLTISSLQPEDFATYYCQQGDSVPLTFGGGTKVEIK

SEQ ID NO: 1143 - DNA, 1458 bp, synthetic construct
  misc_feature 1..1458: note = source = /note="Description of Artificial Sequence: Synthetic polynucleotide"
  source 1..1458: mol_type = other DNA
atggccctccctgtcaccgccctgctgcttccgctggctcttctgctccacgccgctcggccccaagtgcagctggtccagtcgggagccgaagtcaagaagcccggcgctagcgtgaaagtgtcctgcaaagcctccgggtacacattcacctcctactggatgaattgggtcagacaggcgcccggccagggactcgagtggatgggaaggattgatccttacgactccgaaacccattacaaccagaagttcaaggaccgcgtgaccatgactgtggataagtccacttccaccgcttacatggagctgtccagcctgcgctccgaggataccgcagtgtactactgcgcccggggaaactgggacgactattggggacagggaactaccgtgaccgtgtcaagcgggggtggcggtagcggaggagggggctccggcggcggcggctcagggggcggaggaagcgacgtgcagctcacccagtcgccctcatttctgtcggcctcagtgggagacagagtgaccattacttgtcgggcctccaagagcatctccaaggacctggcctggtatcagcagaagccaggaaaggcgcctaagttgctcatctactcggggtcgaccctgcaatctggcgtgccgtcccggttctccggttcgggaagcggtaccgaattcacccttactatctcctccctgcaaccggaggacttcgccacctactactgccaacagcacaacaagtacccgtacactttcgggggtggcacgaaggtcgaaatcaagaccactaccccagcaccgaggccacccaccccggctcctaccatcgcctcccagcctctgtccctgcgtccggaggcatgtagacccgcagctggtggggccgtgcatacccggggtcttgacttcgcctgcgatatctacatttgggcccctctggctggtacttgcggggtcctgctgctttcactcgtgatcactctttactgtaagcgcggtcggaagaagctgctgtacatctttaagcaacccttcatgaggcctgtgcagactactcaagaggaggacggctgttcatgccggttcccagaggaggaggaaggcggctgcgaactgcgcgtgaaattcagccgcagcgcagatgctccagcctacaagcaggggcagaaccagctctacaacgaactcaatcttggtcggagagaggagtacgacgtgctggacaagcggagaggacgggacccagaaatgggcgggaagccgcgcagaaagaatccccaagagggcctgtacaacgagctccaaaaggataagatggcagaagcctatagcgagattggtatgaaaggggaacgcagaagaggcaaaggccacgacggactgtaccagggactcagcaccgccaccaaggacacctatgacgctcttcacatgcaggccctgccgcctcgg

SEQ ID NO: 1144 - protein, 486 aa, synthetic construct
  REGION 1..486: note = source = /note="Description of Artificial Sequence: Synthetic polypeptide"
MALPVTALLLPLALLLHAARPQVQLVQSGAEVKKPGASVKVSCKASGYTFTSYWMNWVRQAPGQGLEWMGRIDPYDSETHYNQKFKDRVTMTVDKSTSTAYMELSSLRSEDTAVYYCARGNWDDYWGQGTTVTVSSGGGGSGGGGSGGGGSGGGGSDVQLTQSPSFLSASVGDRVTITCRASKSISKDLAWYQQKPGKAPKLLIYSGSTLQSGVPSRFSGSGSGTEFTLTISSLQPEDFATYYCQQHNKYPYTFGGGTKVEIKTTTPAPRPPTPAPTIASQPLSLRPEACRPAAGGAVHTRGLDFACDIYIWAPLAGTCGVLLLSLVITLYCKRGRKKLLYIFKQPFMRPVQTTQEEDGCSCRFPEEEEGGCELRVKFSRSADAPAYKQGQNQLYNELNLGRREEYDVLDKRRGRDPEMGGKPRRKNPQEGLYNELQKDKMAEAYSEIGMKGERRRGKGHDGLYQGLSTATKDTYDALHMQALPPR

SEQ ID NO: 1145 - protein, 263 aa, synthetic construct
  REGION 1..263: note = source = /note="Description of Artificial Sequence: Synthetic polypeptide"
MALPVTALLLPLALLLHAARPQVQLVQSGAEVKKPGASVKVSCKASGYTFTSYWMNWVRQAPGQGLEWMGRIDPYDSETHYNQKFKDRVTMTVDKSTSTAYMELSSLRSEDTAVYYCARGNWDDYWGQGTTVTVSSGGGGSGGGGSGGGGSGGGGSDVQLTQSPSFLSASVGDRVTITCRASKSISKDLAWYQQKPGKAPKLLIYSGSTLQSGVPSRFSGSGSGTEFTLTISSLQPEDFATYYCQQHNKYPYTFGGGTKVEIK

SEQ ID NO: 1146 - protein, 115 aa, synthetic construct
  REGION 1..115: note = source = /note="Description of Artificial Sequence: Synthetic polypeptide"
QVQLVQSGAEVKKPGASVKVSCKASGYTFTSYWMNWVRQAPGQGLEWMGRIDPYDSETHYNQKFKDRVTMTVDKSTSTAYMELSSLRSEDTAVYYCARGNWDDYWGQGTTVTVSS

SEQ ID NO: 1147 - protein, 107 aa, synthetic construct
  REGION 1..107: note = source = /note="Description of Artificial Sequence: Synthetic polypeptide"
DVQLTQSPSFLSASVGDRVTITCRASKSISKDLAWYQQKPGKAPKLLIYSGSTLQSGVPSRFSGSGSGTEFTLTISSLQPEDFATYYCQQHNKYPYTFGGGTKVEIK

SEQ ID NO: 1148 - DNA, 1458 bp, synthetic construct
  misc_feature 1..1458: note = source = /note="Description of Artificial Sequence: Synthetic polynucleotide"
  source 1..1458: mol_type = other DNA
atggccctccctgtcaccgccctgctgcttccgctggctcttctgctccacgccgctcggccccaagtgcagctggtccagtcgggagccgaagtcaagaagcccggcgctagcgtgaaagtgtcctgcaaagcctccgggtacacattcacctcctactggatgaattgggtcagacaggcgcccggccagggactcgagtggatgggaaggattgatccttacgactccgaaacccattacaaccagaagttcaaggaccgcgtgaccatgactgtggataagtccacttccaccgcttacatggagctgtccagcctgcgctccgaggataccgcagtgtactactgcgcccggggaaactgggacgactattggggacagggaactaccgtgaccgtgtcaagcgggggtggcggtagcggaggagggggctccggcggcggcggctcagggggcggaggaagcgaagtggtgctgacccagtcgcccgcaaccctctctctgtcgccgggagaacgcgccactctttcctgtcgggcgtccaagagcatctcaaaggacctcgcctggtaccagcagaagcctggtcaagccccgcggctgctgatctactccggctccacgctgcaatcaggaatcccagccagattttccggttcggggtcggggactgacttcaccttgaccattagctcgctggaacctgaggacttcgccgtgtattactgccagcagcacaacaagtacccgtacaccttcggaggcggtactaaggtcgagatcaagaccactaccccagcaccgaggccacccaccccggctcctaccatcgcctcccagcctctgtccctgcgtccggaggcatgtagacccgcagctggtggggccgtgcatacccggggtcttgacttcgcctgcgatatctacatttgggcccctctggctggtacttgcggggtcctgctgctttcactcgtgatcactctttactgtaagcgcggtcggaagaagctgctgtacatctttaagcaacccttcatgaggcctgtgcagactactcaagaggaggacggctgttcatgccggttcccagaggaggaggaaggcggctgcgaactgcgcgtgaaattcagccgcagcgcagatgctccagcctacaagcaggggcagaaccagctctacaacgaactcaatcttggtcggagagaggagtacgacgtgctggacaagcggagaggacgggacccagaaatgggcgggaagccgcgcagaaagaatccccaagagggcctgtacaacgagctccaaaaggataagatggcagaagcctatagcgagattggtatgaaaggggaacgcagaagaggcaaaggccacgacggactgtaccagggactcagcaccgccaccaaggacacctatgacgctcttcacatgcaggccctgccgcctcgg

SEQ ID NO: 1149 - protein, 486 aa, synthetic construct
  REGION 1..486: note = source = /note="Description of Artificial Sequence: Synthetic polypeptide"
MALPVTALLLPLALLLHAARPQVQLVQSGAEVKKPGASVKVSCKASGYTFTSYWMNWVRQAPGQGLEWMGRIDPYDSETHYNQKFKDRVTMTVDKSTSTAYMELSSLRSEDTAVYYCARGNWDDYWGQGTTVTVSSGGGGSGGGGSGGGGSGGGGSEVVLTQSPATLSLSPGERATLSCRASKSISKDLAWYQQKPGQAPRLLIYSGSTLQSGIPARFSGSGSGTDFTLTISSLEPEDFAVYYCQQHNKYPYTFGGGTKVEIKTTTPAPRPPTPAPTIASQPLSLRPEACRPAAGGAVHTRGLDFACDIYIWAPLAGTCGVLLLSLVITLYCKRGRKKLLYIFKQPFMRPVQTTQEEDGCSCRFPEEEEGGCELRVKFSRSADAPAYKQGQNQLYNELNLGRREEYDVLDKRRGRDPEMGGKPRRKNPQEGLYNELQKDKMAEAYSEIGMKGERRRGKGHDGLYQGLSTATKDTYDALHMQALPPR

SEQ ID NO: 1150 - protein, 263 aa, synthetic construct
  REGION 1..263: note = source = /note="Description of Artificial Sequence: Synthetic polypeptide"
MALPVTALLLPLALLLHAARPQVQLVQSGAEVKKPGASVKVSCKASGYTFTSYWMNWVRQAPGQGLEWMGRIDPYDSETHYNQKFKDRVTMTVDKSTSTAYMELSSLRSEDTAVYYCARGNWDDYWGQGTTVTVSSGGGGSGGGGSGGGGSGGGGSEVVLTQSPATLSLSPGERATLSCRASKSISKDLAWYQQKPGQAPRLLIYSGSTLQSGIPARFSGSGSGTDFTLTISSLEPEDFAVYYCQQHNKYPYTFGGGTKVEIK

SEQ ID NO: 1151 - protein, 115 aa, synthetic construct; identical to SEQ ID NO: 1146
  REGION 1..115: note = source = /note="Description of Artificial Sequence: Synthetic polypeptide"

SEQ ID NO: 1152 - protein, 107 aa, synthetic construct
  REGION 1..107: note = source = /note="Description of Artificial Sequence: Synthetic polypeptide"
EVVLTQSPATLSLSPGERATLSCRASKSISKDLAWYQQKPGQAPRLLIYSGSTLQSGIPARFSGSGSGTDFTLTISSLEPEDFAVYYCQQHNKYPYTFGGGTKVEIK

SEQ ID NO: 1153 - DNA, 1458 bp, synthetic construct
  misc_feature 1..1458: note = source = /note="Description of Artificial Sequence: Synthetic polynucleotide"
  source 1..1458: mol_type = other DNA
atggccctccctgtcaccgccctgctgcttccgctggctcttctgctccacgccgctcggccccaagtgcagctggtccagtcgggagccgaagtcaagaagcccggcgctagcgtgaaagtgtcctgcaaagcctccgggtacacattcacctcctactggatgaattgggtcagacaggcgcccggccagggactcgagtggatgggaaggattgatccttacgactccgaaacccattacaaccagaagttcaaggaccgcgtgaccatgactgtggataagtccacttccaccgcttacatggagctgtccagcctgcgctccgaggataccgcagtgtactactgcgcccggggaaactgggacgactattggggacagggaactaccgtgaccgtgtcaagcgggggtggcggtagcggaggagggggctccggcggcggcggctcagggggcggaggaagcgacgtcgtgatgacccagtcaccggcattcctgtccgtgactcccggagaaaaggtcacgattacttgccgggcgtccaagagcatctccaaggacctcgcctggtaccaacagaagccggaccaggcccctaagctgttgatctactcggggtccacccttcaatcgggagtgccatcgcggtttagcggttcgggttctgggaccgacttcactttcaccatctcctcactggaagccgaggatgccgccacttactactgtcagcagcacaacaagtatccgtacaccttcggaggcggtaccaaagtggagatcaagaccactaccccagcaccgaggccacccaccccggctcctaccatcgcctcccagcctctgtccctgcgtccggaggcatgtagacccgcagctggtggggccgtgcatacccggggtcttgacttcgcctgcgatatctacatttgggcccctctggctggtacttgcggggtcctgctgctttcactcgtgatcactctttactgtaagcgcggtcggaagaagctgctgtacatctttaagcaacccttcatgaggcctgtgcagactactcaagaggaggacggctgttcatgccggttcccagaggaggaggaaggcggctgcgaactgcgcgtgaaattcagccgcagcgcagatgctccagcctacaagcaggggcagaaccagctctacaacgaactcaatcttggtcggagagaggagtacgacgtgctggacaagcggagaggacgggacccagaaatgggcgggaagccgcgcagaaagaatccccaagagggcctgtacaacgagctccaaaaggataagatggcagaagcctatagcgagattggtatgaaaggggaacgcagaagaggcaaaggccacgacggactgtaccagggactcagcaccgccaccaaggacacctatgacgctcttcacatgcaggccctgccgcctcgg

SEQ ID NO: 1154 - protein, 486 aa, synthetic construct
  REGION 1..486: note = source = /note="Description of Artificial Sequence: Synthetic polypeptide"
MALPVTALLLPLALLLHAARPQVQLVQSGAEVKKPGASVKVSCKASGYTFTSYWMNWVRQAPGQGLEWMGRIDPYDSETHYNQKFKDRVTMTVDKSTSTAYMELSSLRSEDTAVYYCARGNWDDYWGQGTTVTVSSGGGGSGGGGSGGGGSGGGGSDVVMTQSPAFLSVTPGEKVTITCRASKSISKDLAWYQQKPDQAPKLLIYSGSTLQSGVPSRFSGSGSGTDFTFTISSLEAEDAATYYCQQHNKYPYTFGGGTKVEIKTTTPAPRPPTPAPTIASQPLSLRPEACRPAAGGAVHTRGLDFACDIYIWAPLAGTCGVLLLSLVITLYCKRGRKKLLYIFKQPFMRPVQTTQEEDGCSCRFPEEEEGGCELRVKFSRSADAPAYKQGQNQLYNELNLGRREEYDVLDKRRGRDPEMGGKPRRKNPQEGLYNELQKDKMAEAYSEIGMKGERRRGKGHDGLYQGLSTATKDTYDALHMQALPPR

SEQ ID NO: 1155 - protein, 263 aa, synthetic construct
  REGION 1..263: note = source = /note="Description of Artificial Sequence: Synthetic polypeptide"
MALPVTALLLPLALLLHAARPQVQLVQSGAEVKKPGASVKVSCKASGYTFTSYWMNWVRQAPGQGLEWMGRIDPYDSETHYNQKFKDRVTMTVDKSTSTAYMELSSLRSEDTAVYYCARGNWDDYWGQGTTVTVSSGGGGSGGGGSGGGGSGGGGSDVVMTQSPAFLSVTPGEKVTITCRASKSISKDLAWYQQKPDQAPKLLIYSGSTLQSGVPSRFSGSGSGTDFTFTISSLEAEDAATYYCQQHNKYPYTFGGGTKVEIK

SEQ ID NO: 1156 - protein, 115 aa, synthetic construct; identical to SEQ ID NO: 1146
  REGION 1..115: note = source = /note="Description of Artificial Sequence: Synthetic polypeptide"

SEQ ID NO: 1157 - protein, 107 aa, synthetic construct
  REGION 1..107: note = source = /note="Description of Artificial Sequence: Synthetic polypeptide"
DVVMTQSPAFLSVTPGEKVTITCRASKSISKDLAWYQQKPDQAPKLLIYSGSTLQSGVPSRFSGSGSGTDFTFTISSLEAEDAATYYCQQHNKYPYTFGGGTKVEIK

SEQ ID NO: 1158 - DNA, 1458 bp, synthetic construct
  misc_feature 1..1458: note = source = /note="Description of Artificial Sequence: Synthetic polynucleotide"
  source 1..1458: mol_type = other DNA
atggccctccctgtcaccgccctgctgcttccgctggctcttctgctccacgccgctcggccccaagtgcagctggtccagtcgggagccgaagtcaagaagcccggcgctagcgtgaaagtgtcctgcaaagcctccgggtacacattcacctcctactggatgaattgggtcagacaggcgcccggccagggactcgagtggatgggaaggattgatccttacgactccgaaacccattacaaccagaagttcaaggaccgcgtgaccatgactgtggataagtccacttccaccgcttacatggagctgtccagcctgcgctccgaggataccgcagtgtactactgcgcccggggaaactgggacgactattggggacagggaactaccgtgaccgtgtcaagcgggggtggcggtagcggaggagggggctccggcggcggcggctcagggggcggaggaagcgacgtggtcatgactcagtccccggactcactcgcggtgtcgcttggagagagagcgaccatcaactgtcgggcctcaaagagcatcagcaaggacctggcctggtaccagcagaagccgggacagccgccaaagctgctgatctactccgggtccaccttgcaatctggtgtccctgaccggttctccggttccgggtcgggtaccgacttcacgctcactatttcgtcgctgcaagccgaagatgtggccgtgtactattgccaacagcacaacaagtacccctacacttttggcggaggcaccaaggtggaaatcaagaccactaccccagcaccgaggccacccaccccggctcctaccatcgcctcccagcctctgtccctgcgtccggaggcatgtagacccgcagctggtggggccgtgcatacccggggtcttgacttcgcctgcgatatctacatttgggcccctctggctggtacttgcggggtcctgctgctttcactcgtgatcactctttactgtaagcgcggtcggaagaagctgctgtacatctttaagcaacccttcatgaggcctgtgcagactactcaagaggaggacggctgttcatgccggttcccagaggaggaggaaggcggctgcgaactgcgcgtgaaattcagccgcagcgcagatgctccagcctacaagcaggggcagaaccagctctacaacgaactcaatcttggtcggagagaggagtacgacgtgctggacaagcggagaggacgggacccagaaatgggcgggaagccgcgcagaaagaatccccaagagggcctgtacaacgagctccaaaaggataagatggcagaagcctatagcgagattggtatgaaaggggaacgcagaagaggcaaaggccacgacggactgtaccagggactcagcaccgccaccaaggacacctatgacgctcttcacatgcaggccctgccgcctcgg

SEQ ID NO: 1159 - protein, 486 aa, synthetic construct
  REGION 1..486: note = source = /note="Description of Artificial Sequence: Synthetic polypeptide"
MALPVTALLLPLALLLHAARPQVQLVQSGAEVKKPGASVKVSCKASGYTFTSYWMNWVRQAPGQGLEWMGRIDPYDSETHYNQKFKDRVTMTVDKSTSTAYMELSSLRSEDTAVYYCARGNWDDYWGQGTTVTVSSGGGGSGGGGSGGGGSGGGGSDVVMTQSPDSLAVSLGERATINCRASKSISKDLAWYQQKPGQPPKLLIYSGSTLQSGVPDRFSGSGSGTDFTLTISSLQAEDVAVYYCQQHNKYPYTFGGGTKVEIKTTTPAPRPPTPAPTIASQPLSLRPEACRPAAGGAVHTRGLDFACDIYIWAPLAGTCGVLLLSLVITLYCKRGRKKLLYIFKQPFMRPVQTTQEEDGCSCRFPEEEEGGCELRVKFSRSADAPAYKQGQNQLYNELNLGRREEYDVLDKRRGRDPEMGGKPRRKNPQEGLYNELQKDKMAEAYSEIGMKGERRRGKGHDGLYQGLSTATKDTYDALHMQALPPR

SEQ ID NO: 1160 - protein, 263 aa, synthetic construct
  REGION 1..263: note = source = /note="Description of Artificial Sequence: Synthetic polypeptide"
MALPVTALLLPLALLLHAARPQVQLVQSGAEVKKPGASVKVSCKASGYTFTSYWMNWVRQAPGQGLEWMGRIDPYDSETHYNQKFKDRVTMTVDKSTSTAYMELSSLRSEDTAVYYCARGNWDDYWGQGTTVTVSSGGGGSGGGGSGGGGSGGGGSDVVMTQSPDSLAVSLGERATINCRASKSISKDLAWYQQKPGQPPKLLIYSGSTLQSGVPDRFSGSGSGTDFTLTISSLQAEDVAVYYCQQHNKYPYTFGGGTKVEIK

SEQ ID NO: 1161 - protein, 115 aa, synthetic construct; identical to SEQ ID NO: 1146
  REGION 1..115: note = source = /note="Description of Artificial Sequence: Synthetic polypeptide"

SEQ ID NO: 1162 - protein, 107 aa, synthetic construct
  REGION 1..107: note = source = /note="Description of Artificial Sequence: Synthetic polypeptide"
DVVMTQSPDSLAVSLGERATINCRASKSISKDLAWYQQKPGQPPKLLIYSGSTLQSGVPDRFSGSGSGTDFTLTISSLQAEDVAVYYCQQHNKYPYTFGGGTKVEIK

SEQ ID NO: 1163 - DNA, 1458 bp, synthetic construct
  misc_feature 1..1458: note = source = /note="Description of Artificial Sequence: Synthetic polynucleotide"
  source 1..1458: mol_type = other DNA
atggccctccctgtcaccgccctgctgcttccgctggctcttctgctccacgccgctcggcccgacgtgcagctcacccagtcgccctcatttctgtcggcctcagtgggagacagagtgaccattacttgtcgggcctccaagagcatctccaaggacctggcctggtatcagcagaagccaggaaaggcgcctaagttgctcatctactcggggtcgaccctgcaatctggcgtgccgtcccggttctccggttcgggaagcggtaccgaattcacccttactatctcctccctgcaaccggaggacttcgccacctactactgccaacagcacaacaagtacccgtacactttcgggggtggcacgaaggtcgaaatcaaggggggtggcggtagcggaggagggggctccggcggcggcggctcagggggcggaggaagccaagtgcagctggtccagtcgggagccgaagtcaagaagcccggcgctagcgtgaaagtgtcctgcaaagcctccgggtacacattcacctcctactggatgaattgggtcagacaggcgcccggccagggactcgagtggatgggaaggattgatccttacgactccgaaacccattacaaccagaagttcaaggaccgcgtgaccatgactgtggataagtccacttccaccgcttacatggagctgtccagcctgcgctccgaggataccgcagtgtactactgcgcccggggaaactgggacgactattggggacagggaactaccgtgaccgtgtcaagcaccactaccccagcaccgaggccacccaccccggctcctaccatcgcctcccagcctctgtccctgcgtccggaggcatgtagacccgcagctggtggggccgtgcatacccggggtcttgacttcgcctgcgatatctacatttgggcccctctggctggtacttgcggggtcctgctgctttcactcgtgatcactctttactgtaagcgcggtcggaagaagctgctgtacatctttaagcaacccttcatgaggcctgtgcagactactcaagaggaggacggctgttcatgccggttcccagaggaggaggaaggcggctgcgaactgcgcgtgaaattcagccgcagcgcagatgctccagcctacaagcaggggcagaaccagctctacaacgaactcaatcttggtcggagagaggagtacgacgtgctggacaagcggagaggacgggacccagaaatgggcgggaagccgcgcagaaagaatccccaagagggcctgtacaacgagctccaaaaggataagatggcagaagcctatagcgagattggtatgaaaggggaacgcagaagaggcaaaggccacgacggactgtaccagggactcagcaccgccaccaaggacacctatgacgctcttcacatgcaggccctgccgcctcgg

SEQ ID NO: 1164 - protein, 486 aa, synthetic construct
  REGION 1..486: note = source = /note="Description of Artificial Sequence: Synthetic polypeptide"
MALPVTALLLPLALLLHAARPDVQLTQSPSFLSASVGDRVTITCRASKSISKDLAWYQQKPGKAPKLLIYSGSTLQSGVPSRFSGSGSGTEFTLTISSLQPEDFATYYCQQHNKYPYTFGGGTKVEIKGGGGSGGGGSGGGGSGGGGSQVQLVQSGAEVKKPGASVKVSCKASGYTFTSYWMNWVRQAPGQGLEWMGRIDPYDSETHYNQKFKDRVTMTVDKSTSTAYMELSSLRSEDTAVYYCARGNWDDYWGQGTTVTVSSTTTPAPRPPTPAPTIASQPLSLRPEACRPAAGGAVHTRGLDFACDIYIWAPLAGTCGVLLLSLVITLYCKRGRKKLLYIFKQPFMRPVQTTQEEDGCSCRFPEEEEGGCELRVKFSRSADAPAYKQGQNQLYNELNLGRREEYDVLDKRRGRDPEMGGKPRRKNPQEGLYNELQKDKMAEAYSEIGMKGERRRGKGHDGLYQGLSTATKDTYDALHMQALPPR

SEQ ID NO: 1165 - protein, 263 aa, synthetic construct
  REGION 1..263: note = source = /note="Description of Artificial Sequence: Synthetic polypeptide"
MALPVTALLLPLALLLHAARPDVQLTQSPSFLSASVGDRVTITCRASKSISKDLAWYQQKPGKAPKLLIYSGSTLQSGVPSRFSGSGSGTEFTLTISSLQPEDFATYYCQQHNKYPYTFGGGTKVEIKGGGGSGGGGSGGGGSGGGGSQVQLVQSGAEVKKPGASVKVSCKASGYTFTSYWMNWVRQAPGQGLEWMGRIDPYDSETHYNQKFKDRVTMTVDKSTSTAYMELSSLRSEDTAVYYCARGNWDDYWGQGTTVTVSS

SEQ ID NO: 1166 - protein, 115 aa, synthetic construct; identical to SEQ ID NO: 1146
  REGION 1..115: note = source = /note="Description of Artificial Sequence: Synthetic polypeptide"

SEQ ID NO: 1167 - protein, 107 aa, synthetic construct; identical to SEQ ID NO: 1147
  REGION 1..107: note = source = /note="Description of Artificial Sequence: Synthetic polypeptide"

SEQ ID NO: 1168 - DNA, 1458 bp, synthetic construct
  misc_feature 1..1458: note = source = /note="Description of Artificial Sequence: Synthetic polynucleotide"
  source 1..1458: mol_type = other DNA
atggccctccctgtcaccgccctgctgcttccgctggctcttctgctccacgccgctcggcccgaagtggtgctgacccagtcgcccgcaaccctctctctgtcgccgggagaacgcgccactctttcctgtcgggcgtccaagagcatctcaaaggacctcgcctggtaccagcagaagcctggtcaagccccgcggctgctgatctactccggctccacgctgcaatcaggaatcccagccagattttccggttcggggtcggggactgacttcaccttgaccattagctcgctggaacctgaggacttcgccgtgtattactgccagcagcacaacaagtacccgtacaccttcggaggcggtactaaggtcgagatcaaggggggtggcggtagcggaggagggggctccggcggcggcggctcagggggcggaggaagccaagtgcagctggtccagtcgggagccgaagtcaagaagcccggcgctagcgtgaaagtgtcctgcaaagcctccgggtacacattcacctcctactggatgaattgggtcagacaggcgcccggccagggactcgagtggatgggaaggattgatccttacgactccgaaacccattacaaccagaagttcaaggaccgcgtgaccatgactgtggataagtccacttccaccgcttacatggagctgtccagcctgcgctccgaggataccgcagtgtactactgcgcccggggaaactgggacgactattggggacagggaactaccgtgaccgtgtcaagcaccactaccccagcaccgaggccacccaccccggctcctaccatcgcctcccagcctctgtccctgcgtccggaggcatgtagacccgcagctggtggggccgtgcatacccggggtcttgacttcgcctgcgatatctacatttgggcccctctggctggtacttgcggggtcctgctgctttcactcgtgatcactctttactgtaagcgcggtcggaagaagctgctgtacatctttaagcaacccttcatgaggcctgtgcagactactcaagaggaggacggctgttcatgccggttcccagaggaggaggaaggcggctgcgaactgcgcgtgaaattcagccgcagcgcagatgctccagcctacaagcaggggcagaaccagctctacaacgaactcaatcttggtcggagagaggagtacgacgtgctggacaagcggagaggacgggacccagaaatgggcgggaagccgcgcagaaagaatccccaagagggcctgtacaacgagctccaaaaggataagatggcagaagcctatagcgagattggtatgaaaggggaacgcagaagaggcaaaggccacgacggactgtaccagggactcagcaccgccaccaaggacacctatgacgctcttcacatgcaggccctgccgcctcgg

SEQ ID NO: 1169 - protein, 486 aa, synthetic construct
  REGION 1..486: note = source = /note="Description of Artificial Sequence: Synthetic polypeptide"
MALPVTALLLPLALLLHAARPEVVLTQSPATLSLSPGERATLSCRASKSISKDLAWYQQKPGQAPRLLIYSGSTLQSGIPARFSGSGSGTDFTLTISSLEPEDFAVYYCQQHNKYPYTFGGGTKVEIKGGGGSGGGGSGGGGSGGGGSQVQLVQSGAEVKKPGASVKVSCKASGYTFTSYWMNWVRQAPGQGLEWMGRIDPYDSETHYNQKFKDRVTMTVDKSTSTAYMELSSLRSEDTAVYYCARGNWDDYWGQGTTVTVSSTTTPAPRPPTPAPTIASQPLSLRPEACRPAAGGAVHTRGLDFACDIYIWAPLAGTCGVLLLSLVITLYCKRGRKKLLYIFKQPFMRPVQTTQEEDGCSCRFPEEEEGGCELRVKFSRSADAPAYKQGQNQLYNELNLGRREEYDVLDKRRGRDPEMGGKPRRKNPQEGLYNELQKDKMAEAYSEIGMKGERRRGKGHDGLYQGLSTATKDTYDALHMQALPPR

SEQ ID NO: 1170 - protein, 263 aa, synthetic construct
  REGION 1..263: note = source = /note="Description of Artificial Sequence: Synthetic polypeptide"
MALPVTALLLPLALLLHAARPEVVLTQSPATLSLSPGERATLSCRASKSISKDLAWYQQKPGQAPRLLIYSGSTLQSGIPARFSGSGSGTDFTLTISSLEPEDFAVYYCQQHNKYPYTFGGGTKVEIKGGGGSGGGGSGGGGSGGGGSQVQLVQSGAEVKKPGASVKVSCKASGYTFTSYWMNWVRQAPGQGLEWMGRIDPYDSETHYNQKFKDRVTMTVDKSTSTAYMELSSLRSEDTAVYYCARGNWDDYWGQGTTVTVSS

SEQ ID NO: 1171 - protein, 115 aa, synthetic construct; identical to SEQ ID NO: 1146
  REGION 1..115: note = source = /note="Description of Artificial Sequence: Synthetic polypeptide"

SEQ ID NO: 1172 - protein, 107 aa, synthetic construct; identical to SEQ ID NO: 1152
  REGION 1..107: note = source = /note="Description of Artificial Sequence: Synthetic polypeptide"

SEQ ID NO: 1173 - DNA, 1458 bp, synthetic construct
  misc_feature 1..1458: note = source = /note="Description of Artificial Sequence: Synthetic polynucleotide"
  source 1..1458: mol_type = other DNA
atggccctccctgtcaccgccctgctgcttccgctggctcttctgctccacgccgctcggcccgacgtcgtgatgacccagtcaccggcattcctgtccgtgactcccggagaaaaggtcacgattacttgccgggcgtccaagagcatctccaaggacctcgcctggtaccaacagaagccggaccaggcccctaagctgttgatctactcggggtccacccttcaatcgggagtgccatcgcggtttagcggttcgggttctgggaccgacttcactttcaccatctcctcactggaagccgaggatgccgccacttactactgtcagcagcacaacaagtatccgtacaccttcggaggcggtaccaaagtggagatcaaggggggtggcggtagcggaggagggggctccggcggcggcggctcagggggcggaggaagccaagtgcagctggtccagtcgggagccgaagtcaagaagcccggcgctagcgtgaaagtgtcctgcaaagcctccgggtacacattcacctcctactggatgaattgggtcagacaggcgcccggccagggactcgagtggatgggaaggattgatccttacgactccgaaacccattacaaccagaagttcaaggaccgcgtgaccatgactgtggataagtccacttccaccgcttacatggagctgtccagcctgcgctccgaggataccgcagtgtactactgcgcccggggaaactgggacgactattggggacagggaactaccgtgaccgtgtcaagcaccactaccccagcaccgaggccacccaccccggctcctaccatcgcctcccagcctctgtccctgcgtccggaggcatgtagacccgcagctggtggggccgtgcatacccggggtcttgacttcgcctgcgatatctacatttgggcccctctggctggtacttgcggggtcctgctgctttcactcgtgatcactctttactgtaagcgcggtcggaagaagctgctgtacatctttaagcaacccttcatgaggcctgtgcagactactcaagaggaggacggctgttcatgccggttcccagaggaggaggaaggcggctgcgaactgcgcgtgaaattcagccgcagcgcagatgctccagcctacaagcaggggcagaaccagctctacaacgaactcaatcttggtcggagagaggagtacgacgtgctggacaagcggagaggacgggacccagaaatgggcgggaagccgcgcagaaagaatccccaagagggcctgtacaacgagctccaaaaggataagatggcagaagcctatagcgagattggtatgaaaggggaacgcagaagaggcaaaggccacgacggactgtaccagggactcagcaccgccaccaaggacacctatgacgctcttcacatgcaggccctgccgcctcgg

SEQ ID NO: 1174 - protein, 486 aa, synthetic construct
  REGION 1..486: note = source = /note="Description of Artificial Sequence: Synthetic polypeptide"
MALPVTALLLPLALLLHAARPDVVMTQSPAFLSVTPGEKVTITCRASKSISKDLAWYQQKPDQAPKLLIYSGSTLQSGVPSRFSGSGSGTDFTFTISSLEAEDAATYYCQQHNKYPYTFGGGTKVEIKGGGGSGGGGSGGGGSGGGGSQVQLVQSGAEVKKPGASVKVSCKASGYTFTSYWMNWVRQAPGQGLEWMGRIDPYDSETHYNQKFKDRVTMTVDKSTSTAYMELSSLRSEDTAVYYCARGNWDDYWGQGTTVTVSSTTTPAPRPPTPAPTIASQPLSLRPEACRPAAGGAVHTRGLDFACDIYIWAPLAGTCGVLLLSLVITLYCKRGRKKLLYIFKQPFMRPVQTTQEEDGCSCRFPEEEEGGCELRVKFSRSADAPAYKQGQNQLYNELNLGRREEYDVLDKRRGRDPEMGGKPRRKNPQEGLYNELQKDKMAEAYSEIGMKGERRRGKGHDGLYQGLSTATKDTYDALHMQALPPR

SEQ ID NO: 1175 - protein, 263 aa, synthetic construct
  REGION 1..263: note = source = /note="Description of Artificial Sequence: Synthetic polypeptide"
MALPVTALLLPLALLLHAARPDVVMTQSPAFLSVTPGEKVTITCRASKSISKDLAWYQQKPDQAPKLLIYSGSTLQSGVPSRFSGSGSGTDFTFTISSLEAEDAATYYCQQHNKYPYTFGGGTKVEIKGGGGSGGGGSGGGGSGGGGSQVQLVQSGAEVKKPGASVKVSCKASGYTFTSYWMNWVRQAPGQGLEWMGRIDPYDSETHYNQKFKDRVTMTVDKSTSTAYMELSSLRSEDTAVYYCARGNWDDYWGQGTTVTVSS

SEQ ID NO: 1176 - protein, 115 aa, synthetic construct; identical to SEQ ID NO: 1146
  REGION 1..115: note = source = /note="Description of Artificial Sequence: Synthetic polypeptide"

SEQ ID NO: 1177 - protein, 107 aa, synthetic construct; identical to SEQ ID NO: 1157
  REGION 1..107: note = source = /note="Description of Artificial Sequence: Synthetic polypeptide"

SEQ ID NO: 1178 - DNA, 1458 bp, synthetic construct
  misc_feature 1..1458: note = source = /note="Description of Artificial Sequence: Synthetic polynucleotide"
  source 1..1458: mol_type = other DNA
atggccctccctgtcaccgccctgctgcttccgctggctcttctgctccacgccgctcggcccgacgtggtcatgactcagtccccggactcactcgcggtgtcgcttggagagagagcgaccatcaactgtcgggcctcaaagagcatcagcaaggacctggcctggtaccagcagaagccgggacagccgccaaagctgctgatctactccgggtccaccttgcaatctggtgtccctgaccggttctccggttccgggtcgggtaccgacttcacgctcactatttcgtcgctgcaagccgaagatgtggccgtgtactattgccaacagcacaacaagtacccctacacttttggcggaggcaccaaggtggaaatcaaggggggtggcggtagcggaggagggggctccggcggcggcggctcagggggcggaggaagccaagtgcagctggtccagtcgggagccgaagtcaagaagcccggcgctagcgtgaaagtgtcctgcaaagcctccgggtacacattcacctcctactggatgaattgggtcagacaggcgcccggccagggactcgagtggatgggaaggattgatccttacgactccgaaacccattacaaccagaagttcaaggaccgcgtgaccatgactgtggataagtccacttccaccgcttacatggagctgtccagcctgcgctccgaggataccgcagtgtactactgcgcccggggaaactgggacgactattggggacagggaactaccgtgaccgtgtcaagcaccactaccccagcaccgaggccacccaccccggctcctaccatcgcctcccagcctctgtccctgcgtccggaggcatgtagacccgcagctggtggggccgtgcatacccggggtcttgacttcgcctgcgatatctacatttgggcccctctggctggtacttgcggggtcctgctgctttcactcgtgatcactctttactgtaagcgcggtcggaagaagctgctgtacatctttaagcaacccttcatgaggcctgtgcagactactcaagaggaggacggctgttcatgccggttcccagaggaggaggaaggcggctgcgaactgcgcgtgaaattcagccgcagcgcagatgctccagcctacaagcaggggcagaaccagctctacaacgaactcaatcttggtcggagagaggagtacgacgtgctggacaagcggagaggacgggacccagaaatgggcgggaagccgcgcagaaagaatccccaagagggcctgtacaacgagctccaaaaggataagatggcagaagcctatagcgagattggtatgaaaggggaacgcagaagaggcaaaggccacgacggactgtaccagggactcagcaccgccaccaaggacacctatgacgctcttcacatgcaggccctgccgcctcgg

SEQ ID NO: 1179 - protein, 486 aa, synthetic construct
  REGION 1..486: note = source = /note="Description of Artificial Sequence: Synthetic polypeptide"
MALPVTALLLPLALLLHAARPDVVMTQSPDSLAVSLGERATINCRASKSISKDLAWYQQKPGQPPKLLIYSGSTLQSGVPDRFSGSGSGTDFTLTISSLQAEDVAVYYCQQHNKYPYTFGGGTKVEIKGGGGSGGGGSGGGGSGGGGSQVQLVQSGAEVKKPGASVKVSCKASGYTFTSYWMNWVRQAPGQGLEWMGRIDPYDSETHYNQKFKDRVTMTVDKSTSTAYMELSSLRSEDTAVYYCARGNWDDYWGQGTTVTVSSTTTPAPRPPTPAPTIASQPLSLRPEACRPAAGGAVHTRGLDFACDIYIWAPLAGTCGVLLLSLVITLYCKRGRKKLLYIFKQPFMRPVQTTQEEDGCSCRFPEEEEGGCELRVKFSRSADAPAYKQGQNQLYNELNLGRREEYDVLDKRRGRDPEMGGKPRRKNPQEGLYNELQKDKMAEAYSEIGMKGERRRGKGHDGLYQGLSTATKDTYDALHMQALPPR

SEQ ID NO: 1180 - protein, 263 aa, synthetic construct
  REGION 1..263: note = source = /note="Description of Artificial Sequence: Synthetic polypeptide"
MALPVTALLLPLALLLHAARPDVVMTQSPDSLAVSLGERATINCRASKSISKDLAWYQQKPGQPPKLLIYSGSTLQSGVPDRFSGSGSGTDFTLTISSLQAEDVAVYYCQQHNKYPYTFGGGTKVEIKGGGGSGGGGSGGGGSGGGGSQVQLVQSGAEVKKPGASVKVSCKASGYTFTSYWMNWVRQAPGQGLEWMGRIDPYDSETHYNQKFKDRVTMTVDKSTSTAYMELSSLRSEDTAVYYCARGNWDDYWGQGTTVTVSS

SEQ ID NO: 1181 - protein, 115 aa, synthetic construct; identical to SEQ ID NO: 1146
  REGION 1..115: note = source = /note="Description of Artificial Sequence: Synthetic polypeptide"

SEQ ID NO: 1182 - protein, 107 aa, synthetic construct; identical to SEQ ID NO: 1162
  REGION 1..107: note = source = /note="Description of Artificial Sequence: Synthetic polypeptide"

SEQ ID NO: 1183 - DNA, 1458 bp, synthetic construct
  misc_feature 1..1458: note = source = /note="Description of Artificial Sequence: Synthetic polynucleotide"
  source 1..1458: mol_type = other DNA
atggccctccctgtcaccgccctgctgcttccgctggctcttctgctccacgccgctcggccccaagtgcagctggtgcagtcaggcagcgaactgaagaagcccggagcctccgtcaaagtgtcctgcaaagcctcgggatacaccttcacctcctactggatgaactgggtccgccaggcacctggacaggggctggagtggatgggaaggatcgatccctacgattccgaaacccattacaatcagaagttcaaggaccggtttgtgttctccgtggacaagtccgtgtccaccgcctacctccaaattagcagcctgaaggcggaggatacagctgtctactactgcgctcgcggaaactgggatgactattggggccagggaactaccgtgactgtgtcctccgggggtggcggtagcggaggagggggctccggcggcggcggctcagggggcggaggaagcgacgtgcagctcacccagtcgccctcatttctgtcggcctcagtgggagacagagtgaccattacttgtcgggcctccaagagcatctccaaggacctggcctggtatcagcagaagccaggaaaggcgcctaagttgctcatctactcggggtcgaccctgcaatctggcgtgccgtcccggttctccggttcgggaagcggtaccgaattcacccttactatctcctccctgcaaccggaggacttcgccacctactactgccaacagcacaacaagtacccgtacactttcgggggtggcacgaaggtcgaaatcaagaccactaccccagcaccgaggccacccaccccggctcctaccatcgcctcccagcctctgtccctgcgtccggaggcatgtagacccgcagctggtggggccgtgcatacccggggtcttgacttcgcctgcgatatctacatttgggcccctctggctggtacttgcggggtcctgctgctttcactcgtgatcactctttactgtaagcgcggtcggaagaagctgctgtacatctttaagcaacccttcatgaggcctgtgcagactactcaagaggaggacggctgttcatgccggttcccagaggaggaggaaggcggctgcgaactgcgcgtgaaattcagccgcagcgcagatgctccagcctacaagcaggggcagaaccagctctacaacgaactcaatcttggtcggagagaggagtacgacgtgctggacaagcggagaggacgggacccagaaatgggcgggaagccgcgcagaaagaatccccaagagggcctgtacaacgagctccaaaaggataagatggcagaagcctatagcgagattggtatgaaaggggaacgcagaagaggcaaaggccacgacggactgtaccagggactcagcaccgccaccaaggacacctatgacgctcttcacatgcaggccctgccgcctcgg

SEQ ID NO: 1184 - protein, 486 aa, synthetic construct
  REGION 1..486: note = source = /note="Description of Artificial Sequence: Synthetic polypeptide"
MALPVTALLLPLALLLHAARPQVQLVQSGSELKKPGASVKVSCKASGYTFTSYWMNWVRQAPGQGLEWMGRIDPYDSETHYNQKFKDRFVFSVDKSVSTAYLQISSLKAEDTAVYYCARGNWDDYWGQGTTVTVSSGGGGSGGGGSGGGGSGGGGSDVQLTQSPSFLSASVGDRVTITCRASKSISKDLAWYQQKPGKAPKLLIYSGSTLQSGVPSRFSGSGSGTEFTLTISSLQPEDFATYYCQQHNKYPYTFGGGTKVEIKTTTPAPRPPTPAPTIASQPLSLRPEACRPAAGGAVHTRGLDFACDIYIWAPLAGTCGVLLLSLVITLYCKRGRKKLLYIFKQPFMRPVQTTQEEDGCSCRFPEEEEGGCELRVKFSRSADAPAYKQGQNQLYNELNLGRREEYDVLDKRRGRDPEMGGKPRRKNPQEGLYNELQKDKMAEAYSEIGMKGERRRGKGHDGLYQGLSTATKDTYDALHMQALPPR

SEQ ID NO: 1185 - protein, 263 aa, synthetic construct
  REGION 1..263: note = source = /note="Description of Artificial Sequence: Synthetic polypeptide"
MALPVTALLLPLALLLHAARPQVQLVQSGSELKKPGASVKVSCKASGYTFTSYWMNWVRQAPGQGLEWMGRIDPYDSETHYNQKFKDRFVFSVDKSVSTAYLQISSLKAEDTAVYYCARGNWDDYWGQGTTVTVSSGGGGSGGGGSGGGGSGGGGSDVQLTQSPSFLSASVGDRVTITCRASKSISKDLAWYQQKPGKAPKLLIYSGSTLQSGVPSRFSGSGSGTEFTLTISSLQPEDFATYYCQQHNKYPYTFGGGTKVEIK

SEQ ID NO: 1186 - protein, 115 aa, synthetic construct
  REGION 1..115: note = source = /note="Description of Artificial Sequence: Synthetic polypeptide"
QVQLVQSGSELKKPGASVKVSCKASGYTFTSYWMNWVRQAPGQGLEWMGRIDPYDSETHYNQKFKDRFVFSVDKSVSTAYLQISSLKAEDTAVYYCARGNWDDYWGQGTTVTVSS

SEQ ID NO: 1187 - protein, 107 aa, synthetic construct; identical to SEQ ID NO: 1147
  REGION 1..107: note = source = /note="Description of Artificial Sequence: Synthetic polypeptide"

SEQ ID NO: 1188 - DNA, 1458 bp, synthetic construct
  misc_feature 1..1458: note = source = /note="Description of Artificial Sequence: Synthetic polynucleotide"
  source 1..1458: mol_type = other DNA
atggccctccctgtcaccgccctgctgcttccgctggctcttctgctccacgccgctcggccccaagtgcagctggtgcagtcaggcagcgaactgaagaagcccggagcctccgtcaaagtgtcctgcaaagcctcgggatacaccttcacctcctactggatgaactgggtccgccaggcacctggacaggggctggagtggatgggaaggatcgatccctacgattccgaaacccattacaatcagaagttcaaggaccggtttgtgttctccgtggacaagtccgtgtccaccgcctacctccaaattagcagcctgaaggcggaggatacagctgtctactactgcgctcgcggaaactgggatgactattggggccagggaactaccgtgactgtgtcctccgggggtggcggtagcggaggagggggctccggcggcggcggctcagggggcggaggaagcgaagtggtgctgacccagtcgcccgcaaccctctctctgtcgccgggagaacgcgccactctttcctgtcgggcgtccaagagcatctcaaaggacctcgcctggtaccagcagaagcctggtcaagccccgcggctgctgatctactccggctccacgctgcaatcaggaatcccagccagattttccggttcggggtcggggactgacttcaccttgaccattagctcgctggaacctgaggacttcgccgtgtattactgccagcagcacaacaagtacccgtacaccttcggaggcggtactaaggtcgagatcaagaccactaccccagcaccgaggccacccaccccggctcctaccatcgcctcccagcctctgtccctgcgtccggaggcatgtagacccgcagctggtggggccgtgcatacccggggtcttgacttcgcctgcgatatctacatttgggcccctctggctggtacttgcggggtcctgctgctttcactcgtgatcactctttactgtaagcgcggtcggaagaagctgctgtacatctttaagcaacccttcatgaggcctgtgcagactactcaagaggaggacggctgttcatgccggttcccagaggaggaggaaggcggctgcgaactgcgcgtgaaattcagccgcagcgcagatgctccagcctacaagcaggggcagaaccagctctacaacgaactcaatcttggtcggagagaggagtacgacgtgctggacaagcggagaggacgggacccagaaatgggcgggaagccgcgcagaaagaatccccaagagggcctgtacaacgagctccaaaaggataagatggcagaagcctatagcgagattggtatgaaaggggaacgcagaagaggcaaaggccacgacggactgtaccagggactcagcaccgccaccaaggacacctatgacgctcttcacatgcaggccctgccgcctcgg

SEQ ID NO: 1189 - protein, 486 aa, synthetic construct
  REGION 1..486: note = source = /note="Description of Artificial Sequence: Synthetic polypeptide"
MALPVTALLLPLALLLHAARPQVQLVQSGSELKKPGASVKVSCKASGYTFTSYWMNWVRQAPGQGLEWMGRIDPYDSETHYNQKFKDRFVFSVDKSVSTAYLQISSLKAEDTAVYYCARGNWDDYWGQGTTVTVSSGGGGSGGGGSGGGGSGGGGSEVVLTQSPATLSLSPGERATLSCRASKSISKDLAWYQQKPGQAPRLLIYSGSTLQSGIPARFSGSGSGTDFTLTISSLEPEDFAVYYCQQHNKYPYTFGGGTKVEIKTTTPAPRPPTPAPTIASQPLSLRPEACRPAAGGAVHTRGLDFACDIYIWAPLAGTCGVLLLSLVITLYCKRGRKKLLYIFKQPFMRPVQTTQEEDGCSCRFPEEEEGGCELRVKFSRSADAPAYKQGQNQLYNELNLGRREEYDVLDKRRGRDPEMGGKPRRKNPQEGLYNELQKDKMAEAYSEIGMKGERRRGKGHDGLYQGLSTATKDTYDALHMQALPPR

SEQ ID NO: 1190 - protein, 263 aa, synthetic construct
  REGION 1..263: note = source = /note="Description of Artificial Sequence: Synthetic polypeptide"
MALPVTALLLPLALLLHAARPQVQLVQSGSELKKPGASVKVSCKASGYTFTSYWMNWVRQAPGQGLEWMGRIDPYDSETHYNQKFKDRFVFSVDKSVSTAYLQISSLKAEDTAVYYCARGNWDDYWGQGTTVTVSSGGGGSGGGGSGGGGSGGGGSEVVLTQSPATLSLSPGERATLSCRASKSISKDLAWYQQKPGQAPRLLIYSGSTLQSGIPARFSGSGSGTDFTLTISSLEPEDFAVYYCQQHNKYPYTFGGGTKVEIK

SEQ ID NO: 1191 - protein, 115 aa, synthetic construct; identical to SEQ ID NO: 1186
  REGION 1..115: note = source = /note="Description of Artificial Sequence: Synthetic polypeptide"

SEQ ID NO: 1192 - protein, 107 aa, synthetic construct; identical to SEQ ID NO: 1152
  REGION 1..107: note = source = /note="Description of Artificial Sequence: Synthetic polypeptide"

SEQ ID NO: 1193 - DNA, 1458 bp, synthetic construct
  misc_feature 1..1458: note = source = /note="Description of Artificial Sequence: Synthetic polynucleotide"
  source 1..1458: mol_type = other DNA
atggccctccctgtcaccgccctgctgcttccgctggctcttctgctccacgccgctcggccccaagtgcagctggtgcagtcaggcagcgaactgaagaagcccggagcctccgtcaaagtgtcctgcaaagcctcgggatacaccttcacctcctactggatgaactgggtccgccaggcacctggacaggggctggagtggatgggaaggatcgatccctacgattccgaaacccattacaatcagaagttcaaggaccggtttgtgttctccgtggacaagtccgtgtccaccgcctacctccaaattagcagcctgaaggcggaggatacagctgtctactactgcgctcgcggaaactgggatgactattggggccagggaactaccgtgactgtgtcctccgggggtggcggtagcggaggagggggctccggcggcggcggctcagggggcggaggaagcgacgtcgtgatgacccagtcaccggcattcctgtccgtgactcccggagaaaaggtcacgattacttgccgggcgtccaagagcatctccaaggacctcgcctggtaccaacagaagccggaccaggcccctaagctgttgatctactcggggtccacccttcaatcgggagtgccatcgcggtttagcggttcgggttctgggaccgacttcactttcaccatctcctcactggaagccgaggatgccgccacttactactgtcagcagcacaacaagtatccgtacaccttcggaggcggtaccaaagtggagatcaagaccactaccccagcaccgaggccacccaccccggctcctaccatcgcctcccagcctctgtccctgcgtccggaggcatgtagacccgcagctggtggggccgtgcatacccggggtcttgacttcgcctgcgatatctacatttgggcccctctggctggtacttgcggggtcctgctgctttcactcgtgatcactctttactgtaagcgcggtcggaagaagctgctgtacatctttaagcaacccttcatgaggcctgtgcagactactcaagaggaggacggctgttcatgccggttcccagaggaggaggaaggcggctgcgaactgcgcgtgaaattcagccgcagcgcagatgctccagcctacaagcaggggcagaaccagctctacaacgaactcaatcttggtcggagagaggagtacgacgtgctggacaagcggagaggacgggacccagaaatgggcgggaagccgcgcagaaagaatccccaagagggcctgtacaacgagctccaaaaggataagatggcagaagcctatagcgagattggtatgaaaggggaacgcagaagaggcaaaggccacgacggactgtaccagggactcagcaccgccaccaaggacacctatgacgctcttcacatgcaggccctgccgcctcgg

SEQ ID NO: 1194 - protein, 486 aa, synthetic construct
  REGION 1..486: note = source = /note="Description of Artificial Sequence: Synthetic polypeptide"
MALPVTALLLPLALLLHAARPQVQLVQSGSELKKPGASVKVSCKASGYTFTSYWMNWVRQAPGQGLEWMGRIDPYDSETHYNQKFKDRFVFSVDKSVSTAYLQISSLKAEDTAVYYCARGNWDDYWGQGTTVTVSSGGGGSGGGGSGGGGSGGGGSDVVMTQSPAFLSVTPGEKVTITCRASKSISKDLAWYQQKPDQAPKLLIYSGSTLQSGVPSRFSGSGSGTDFTFTISSLEAEDAATYYCQQHNKYPYTFGGGTKVEIKTTTPAPRPPTPAPTIASQPLSLRPEACRPAAGGAVHTRGLDFACDIYIWAPLAGTCGVLLLSLVITLYCKRGRKKLLYIFKQPFMRPVQTTQEEDGCSCRFPEEEEGGCELRVKFSRSADAPAYKQGQNQLYNELNLGRREEYDVLDKRRGRDPEMGGKPRRKNPQEGLYNELQKDKMAEAYSEIGMKGERRRGKGHDGLYQGLSTATKDTYDALHMQALPPR

SEQ ID NO: 1195 - protein, 263 aa, synthetic construct
  REGION 1..263: note = source = /note="Description of Artificial Sequence: Synthetic polypeptide"
MALPVTALLLPLALLLHAARPQVQLVQSGSELKKPGASVKVSCKASGYTFTSYWMNWVRQAPGQGLEWMGRIDPYDSETHYNQKFKDRFVFSVDKSVSTAYLQISSLKAEDTAVYYCARGNWDDYWGQGTTVTVSSGGGGSGGGGSGGGGSGGGGSDVVMTQSPAFLSVTPGEKVTITCRASKSISKDLAWYQQKPDQAPKLLIYSGSTLQSGVPSRFSGSGSGTDFTFTISSLEAEDAATYYCQQHNKYPYTFGGGTKVEIK

SEQ ID NO: 1196 - protein, 115 aa, synthetic construct; identical to SEQ ID NO: 1186
  REGION 1..115: note = source = /note="Description of Artificial Sequence: Synthetic polypeptide"

SEQ ID NO: 1197 - protein, 107 aa, synthetic construct; identical to SEQ ID NO: 1157
  REGION 1..107: note = source = /note="Description of Artificial Sequence: Synthetic polypeptide"

SEQ ID NO: 1198 - DNA, 1458 bp, synthetic construct
  misc_feature 1..1458: note = source = /note="Description of Artificial Sequence: Synthetic polynucleotide"
  source 1..1458: mol_type = other DNA
atggccctccctgtcaccgccctgctgcttccgctggctcttctgctccacgccgctcggccccaagtgcagctggtgcagtcaggcagcgaactgaagaagcccggagcctccgtcaaagtgtcctgcaaagcctcgggatacaccttcacctcctactggatgaactgggtccgccaggcacctggacaggggctggagtggatgggaaggatcgatccctacgattccgaaacccattacaatcagaagttcaaggaccggtttgtgttctccgtggacaagtccgtgtccaccgcctacctccaaattagcagcctgaaggcggaggatacagctgtctactactgcgctcgcggaaactgggatgactattggggccagggaactaccgtgactgtgtcctccgggggtggcggtagcggaggagggggctccggcggcggcggctcagggggcggaggaagcgacgtggtcatgactcagtccccggactcactcgcggtgtcgcttggagagagagcgaccatcaactgtcgggcctcaaagagcatcagcaaggacctggcctggtaccagcagaagccgggacagccgccaaagctgctgatctactccgggtccaccttgcaatctggtgtccctgaccggttctccggttccgggtcgggtaccgacttcacgctcactatttcgtcgctgcaagccgaagatgtggccgtgtactattgccaacagcacaacaagtacccctacacttttggcggaggcaccaaggtggaaatcaagaccactaccccagcaccgaggccacccaccccggctcctaccatcgcctcccagcctctgtccctgcgtccggaggcatgtagacccgcagctggtggggccgtgcatacccggggtcttgacttcgcctgcgatatctacatttgggcccctctggctggtacttgcggggtcctgctgctttcactcgtgatcactctttactgtaagcgcggtcggaagaagctgctgtacatctttaagcaacccttcatgaggcctgtgcagactactcaagaggaggacggctgttcatgccggttcccagaggaggaggaaggcggctgcgaactgcgcgtgaaattcagccgcagcgcagatgctccagcctacaagcaggggcagaaccagctctacaacgaactcaatcttggtcggagagaggagtacgacgtgctggacaagcggagaggacgggacccagaaatgggcgggaagccgcgcagaaagaatccccaagagggcctgtacaacgagctccaaaaggataagatggcagaagcctatagcgagattggtatgaaaggggaacgcagaagaggcaaaggccacgacggactgtaccagggactcagcaccgccaccaaggacacctatgacgctcttcacatgcaggccctgccgcctcgg

SEQ ID NO: 1199 - protein, 486 aa, synthetic construct
  REGION 1..486: note = source = /note="Description of Artificial Sequence: Synthetic polypeptide"
MALPVTALLLPLALLLHAARPQVQLVQSGSELKKPGASVKVSCKASGYTFTSYWMNWVRQAPGQGLEWMGRIDPYDSETHYNQKFKDRFVFSVDKSVSTAYLQISSLKAEDTAVYYCARGNWDDYWGQGTTVTVSSGGGGSGGGGSGGGGSGGGGSDVVMTQSPDSLAVSLGERATINCRASKSISKDLAWYQQKPGQPPKLLIYSGSTLQSGVPDRFSGSGSGTDFTLTISSLQAEDVAVYYCQQHNKYPYTFGGGTKVEIKTTTPAPRPPTPAPTIASQPLSLRPEACRPAAGGAVHTRGLDFACDIYIWAPLAGTCGVLLLSLVITLYCKRGRKKLLYIFKQPFMRPVQTTQEEDGCSCRFPEEEEGGCELRVKFSRSADAPAYKQGQNQLYNELNLGRREEYDVLDKRRGRDPEMGGKPRRKNPQEGLYNELQKDKMAEAYSEIGMKGERRRGKGHDGLYQGLSTATKDTYDALHMQALPPR

SEQ ID NO: 1200 - protein, 263 aa, synthetic construct
  REGION 1..263: note = source = /note="Description of Artificial Sequence: Synthetic polypeptide"
MALPVTALLLPLALLLHAARPQVQLVQSGSELKKPGASVKVSCKASGYTFTSYWMNWVRQAPGQGLEWMGRIDPYDSETHYNQKFKDRFVFSVDKSVSTAYLQISSLKAEDTAVYYCARGNWDDYWGQGTTVTVSSGGGGSGGGGSGGGGSGGGGSDVVMTQSPDSLAVSLGERATINCRASKSISKDLAWYQQKPGQPPKLLIYSGSTLQSGVPDRFSGSGSGTDFTLTISSLQAEDVAVYYCQQHNKYPYTFGGGTKVEIK

SEQ ID NO: 1201 - protein, 115 aa, synthetic construct; identical to SEQ ID NO: 1186
  REGION 1..115: note = source = /note="Description of Artificial Sequence: Synthetic polypeptide"

SEQ ID NO: 1202 - protein, 107 aa, synthetic construct; identical to SEQ ID NO: 1162
  REGION 1..107: note = source = /note="Description of Artificial Sequence: Synthetic polypeptide"

SEQ ID NO: 1203 - DNA, 1458 bp, synthetic construct
  misc_feature 1..1458: note = source = /note="Description of Artificial Sequence: Synthetic polynucleotide"
  source 1..1458: mol_type = other DNA
atggccctccctgtcaccgccctgctgcttccgctggctcttctgctccacgccgctcggcccgacgtgcagctcacccagtcgccctcatttctgtcggcctcagtgggagacagagtgaccattacttgtcgggcctccaagagcatctccaaggacctggcctggtatcagcagaagccaggaaaggcgcctaagttgctcatctactcggggtcgaccctgcaatctggcgtgccgtcccggttctccggttcgggaagcggtaccgaattcacccttactatctcctccctgcaaccggaggacttcgccacctactactgccaacagcacaacaagtacccgtacactttcgggggtggcacgaaggtcgaaatcaaggggggtggcggtagcggaggagggggctccggcggcggcggctcagggggcggaggaagccaagtgcagctggtgcagtcaggcagcgaactgaagaagcccggagcctccgtcaaagtgtcctgcaaagcctcgggatacaccttcacctcctactggatgaactgggtccgccaggcacctggacaggggctggagtggatgggaaggatcgatccctacgattccgaaacccattacaatcagaagttcaaggaccggtttgtgttctccgtggacaagtccgtgtccaccgcctacctccaaattagcagcctgaaggcggaggatacagctgtctactactgcgctcgcggaaactgggatgactattggggccagggaactaccgtgactgtgtcctccaccactaccccagcaccgaggccacccaccccggctcctaccatcgcctcccagcctctgtccctgcgtccggaggcatgtagacccgcagctggtggggccgtgcatacccggggtcttgacttcgcctgcgatatctacatttgggcccctctggctggtacttgcggggtcctgctgctttcactcgtgatcactctttactgtaagcgcggtcggaagaagctgctgtacatctttaagcaacccttcatgaggcctgtgcagactactcaagaggaggacggctgttcatgccggttcccagaggaggaggaaggcggctgcgaactgcgcgtgaaattcagccgcagcgcagatgctccagcctacaagcaggggcagaaccagctctacaacgaactcaatcttggtcggagagaggagtacgacgtgctggacaagcggagaggacgggacccagaaatgggcgggaagccgcgcagaaagaatccccaagagggcctgtacaacgagctccaaaaggataagatggcagaagcctatagcgagattggtatgaaaggggaacgcagaagaggcaaaggccacgacggactgtaccagggactcagcaccgccaccaaggacacctatgacgctcttcacatgcaggccctgccgcctcgg

SEQ ID NO: 1204 - protein, 486 aa, synthetic construct
  REGION 1..486: note = source = /note="Description of Artificial Sequence: Synthetic polypeptide"
MALPVTALLLPLALLLHAARPDVQLTQSPSFLSASVGDRVTITCRASKSISKDLAWYQQKPGKAPKLLIYSGSTLQSGVPSRFSGSGSGTEFTLTISSLQPEDFATYYCQQHNKYPYTFGGGTKVEIKGGGGSGGGGSGGGGSGGGGSQVQLVQSGSELKKPGASVKVSCKASGYTFTSYWMNWVRQAPGQGLEWMGRIDPYDSETHYNQKFKDRFVFSVDKSVSTAYLQISSLKAEDTAVYYCARGNWDDYWGQGTTVTVSSTTTPAPRPPTPAPTIASQPLSLRPEACRPAAGGAVHTRGLDFACDIYIWAPLAGTCGVLLLSLVITLYCKRGRKKLLYIFKQPFMRPVQTTQEEDGCSCRFPEEEEGGCELRVKFSRSADAPAYKQGQNQLYNELNLGRREEYDVLDKRRGRDPEMGGKPRRKNPQEGLYNELQKDKMAEAYSEIGMKGERRRGKGHDGLYQGLSTATKDTYDALHMQALPPR

SEQ ID NO: 1205 - protein, 263 aa, synthetic construct
  REGION 1..263: note = source = /note="Description of Artificial Sequence: Synthetic polypeptide"
MALPVTALLLPLALLLHAARPDVQLTQSPSFLSASVGDRVTITCRASKSISKDLAWYQQKPGKAPKLLIYSGSTLQSGVPSRFSGSGSGTEFTLTISSLQPEDFATYYCQQHNKYPYTFGGGTKVEIKGGGGSGGGGSGGGGSGGGGSQVQLVQSGSELKKPGASVKVSCKASGYTFTSYWMNWVRQAPGQGLEWMGRIDPYDSETHYNQKFKDRFVFSVDKSVSTAYLQISSLKAEDTAVYYCARGNWDDYWGQGTTVTVSS

SEQ ID NO: 1206 - protein, 115 aa, synthetic construct; identical to SEQ ID NO: 1186
  REGION 1..115: note = source = /note="Description of Artificial Sequence: Synthetic polypeptide"

SEQ ID NO: 1207 - protein, 107 aa, synthetic construct; identical to SEQ ID NO: 1147
  REGION 1..107: note = source = /note="Description of Artificial Sequence: Synthetic polypeptide"

SEQ ID NO: 1208 - DNA, 1458 bp, synthetic construct
  misc_feature 1..1458: note = source = /note="Description of Artificial Sequence: Synthetic polynucleotide"
  source 1..1458: mol_type = other DNA
atggccctccctgtcaccgccctgctgcttccgctggctcttctgctccacgccgctcggcccgaagtggtgctgacccagtcgcccgcaaccctctctctgtcgccgggagaacgcgccactctttcctgtcgggcgtccaagagcatctcaaaggacctcgcctggtaccagcagaagcctggtcaagccccgcggctgctgatctactccggctccacgctgcaatcaggaatcccagccagattttccggttcggggtcggggactgacttcaccttgaccattagctcgctggaacctgaggacttcgccgtgtattactgccagcagcacaacaagtacccgtacaccttcggaggcggtactaaggtcgagatcaaggggggtggcggtagcggaggagggggctccggcggcggcggctcagggggcggaggaagccaagtgcagctggtgcagtcaggcagcgaactgaagaagcccggagcctccgtcaaagtgtcctgcaaagcctcgggatacaccttcacctcctactggatgaactgggtccgccaggcacctggacaggggctggagtggatgggaaggatcgatccctacgattccgaaacccattacaatcagaagttcaaggaccggtttgtgttctccgtggacaagtccgtgtccaccgcctacctccaaattagcagcctgaaggcggaggatacagctgtctactactgcgctcgcggaaactgggatgactattggggccagggaactaccgtgactgtgtcctccaccactaccccagcaccgaggccacccaccccggctcctaccatcgcctcccagcctctgtccctgcgtccggaggcatgtagacccgcagctggtggggccgtgcatacccggggtcttgacttcgcctgcgatatctacatttgggcccctctggctggtacttgcggggtcctgctgctttcactcgtgatcactctttactgtaagcgcggtcggaagaagctgctgtacatctttaagcaacccttcatgaggcctgtgcagactactcaagaggaggacggctgttcatgccggttcccagaggaggaggaaggcggctgcgaactgcgcgtgaaattcagccgcagcgcagatgctccagcctacaagcaggggcagaaccagctctacaacgaactcaatcttggtcggagagaggagtacgacgtgctggacaagcggagaggacgggacccagaaatgggcgggaagccgcgcagaaagaatccccaagagggcctgtacaacgagctccaaaaggataagatggcagaagcctatagcgagattggtatgaaaggggaacgcagaagaggcaaaggccacgacggactgtaccagggactcagcaccgccaccaaggacacctatgacgctcttcacatgcaggccctgccgcctcgg

SEQ ID NO: 1209 - protein, 486 aa, synthetic construct
  REGION 1..486: note = source = /note="Description of Artificial Sequence: Synthetic polypeptide"
MALPVTALLLPLALLLHAARPEVVLTQSPATLSLSPGERATLSCRASKSISKDLAWYQQKPGQAPRLLIYSGSTLQSGIPARFSGSGSGTDFTLTISSLEPEDFAVYYCQQHNKYPYTFGGGTKVEIKGGGGSGGGGSGGGGSGGGGSQVQLVQSGSELKKPGASVKVSCKASGYTFTSYWMNWVRQAPGQGLEWMGRIDPYDSETHYNQKFKDRFVFSVDKSVSTAYLQISSLKAEDTAVYYCARGNWDDYWGQGTTVTVSSTTTPAPRPPTPAPTIASQPLSLRPEACRPAAGGAVHTRGLDFACDIYIWAPLAGTCGVLLLSLVITLYCKRGRKKLLYIFKQPFMRPVQTTQEEDGCSCRFPEEEEGGCELRVKFSRSADAPAYKQGQNQLYNELNLGRREEYDVLDKRRGRDPEMGGKPRRKNPQEGLYNELQKDKMAEAYSEIGMKGERRRGKGHDGLYQGLSTATKDTYDALHMQALPPR

SEQ ID NO: 1210 - protein, 263 aa, synthetic construct
  REGION 1..263: note = source = /note="Description of Artificial Sequence: Synthetic polypeptide"
MALPVTALLLPLALLLHAARPEVVLTQSPATLSLSPGERATLSCRASKSISKDLAWYQQKPGQAPRLLIYSGSTLQSGIPARFSGSGSGTDFTLTISSLEPEDFAVYYCQQHNKYPYTFGGGTKVEIKGGGGSGGGGSGGGGSGGGGSQVQLVQSGSELKKPGASVKVSCKASGYTFTSYWMNWVRQAPGQGLEWMGRIDPYDSETHYNQKFKDRFVFSVDKSVSTAYLQISSLKAEDTAVYYCARGNWDDYWGQGTTVTVSS

SEQ ID NO: 1211 - protein, 115 aa, synthetic construct; identical to SEQ ID NO: 1186
  REGION 1..115: note = source = /note="Description of Artificial Sequence: Synthetic polypeptide"

SEQ ID NO: 1212 - protein, 107 aa, synthetic construct; identical to SEQ ID NO: 1152
  REGION 1..107: note = source = /note="Description of Artificial Sequence: Synthetic polypeptide"

SEQ ID NO: 1213 - DNA, 1458 bp, synthetic construct
  misc_feature 1..1458: note = source = /note="Description of Artificial Sequence: Synthetic polynucleotide"
  source 1..1458: mol_type = other DNA
atggccctccctgtcaccgccctgctgcttccgctggctcttctgctccacgccgctcggcccgacgtcgtgatgacccagtcaccggcattcctgtccgtgactcccggagaaaaggtcacgattacttgccgggcgtccaagagcatctccaaggacctcgcctggtaccaacagaagccggaccaggcccctaagctgttgatctactcggggtccacccttcaatcgggagtgccatcgcggtttagcggttcgggttctgggaccgacttcactttcaccatctcctcactggaagccgaggatgccgccacttactactgtcagcagcacaacaagtatccgtacaccttcggaggcggtaccaaagtggagatcaaggggggtggcggtagcggaggagggggctccggcggcggcggctcagggggcggaggaagccaagtgcagctggtgcagtcaggcagcgaactgaagaagcccggagcctccgtcaaagtgtcctgcaaagcctcgggatacaccttcacctcctactggatgaactgggtccgccaggcacctggacaggggctggagtggatgggaaggatcgatccctacgattccgaaacccattacaatcagaagttcaaggaccggtttgtgttctccgtggacaagtccgtgtccaccgcctacctccaaattagcagcctgaaggcggaggatacagctgtctactactgcgctcgcggaaactgggatgactattggggccagggaactaccgtgactgtgtcctccaccactaccccagcaccgaggccacccaccccggctcctaccatcgcctcccagcctctgtccctgcgtccggaggcatgtagacccgcagctggtggggccgtgcatacccggggtcttgacttcgcctgcgatatctacatttgggcccctctggctggtacttgcggggtcctgctgctttcactcgtgatcactctttactgtaagcgcggtcggaagaagctgctgtacatctttaagcaacccttcatgaggcctgtgcagactactcaagaggaggacggctgttcatgccggttcccagaggaggaggaaggcggctgcgaactgcgcgtgaaattcagccgcagcgcagatgctccagcctacaagcaggggcagaaccagctctacaacgaactcaatcttggtcggagagaggagtacgacgtgctggacaagcggagaggacgggacccagaaatgggcgggaagccgcgcagaaagaatccccaagagggcctgtacaacgagctccaaaaggataagatggcagaagcctatagcgagattggtatgaaaggggaacgcagaagaggcaaaggccacgacggactgtaccagggactcagcaccgccaccaaggacacctatgacgctcttcacatgcaggccctgccgcctcgg

SEQ ID NO: 1214 - protein, 486 aa, synthetic construct
  REGION 1..486: note = source = /note="Description of Artificial Sequence: Synthetic polypeptide"
MALPVTALLLPLALLLHAARPDVVMTQSPAFLSVTPGEKVTITCRASKSISKDLAWYQQKPDQAPKLLIYSGSTLQSGVPSRFSGSGSGTDFTFTISSLEAEDAATYYCQQHNKYPYTFGGGTKVEIKGGGGSGGGGSGGGGSGGGGSQVQLVQSGSELKKPGASVKVSCKASGYTFTSYWMNWVRQAPGQGLEWMGRIDPYDSETHYNQKFKDRFVFSVDKSVSTAYLQISSLKAEDTAVYYCARGNWDDYWGQGTTVTVSSTTTPAPRPPTPAPTIASQPLSLRPEACRPAAGGAVHTRGLDFACDIYIWAPLAGTCGVLLLSLVITLYCKRGRKKLLYIFKQPFMRPVQTTQEEDGCSCRFPEEEEGGCELRVKFSRSADAPAYKQGQNQLYNELNLGRREEYDVLDKRRGRDPEMGGKPRRKNPQEGLYNELQKDKMAEAYSEIGMKGERRRGKGHDGLYQGLSTATKDTYDALHMQALPPR

SEQ ID NO: 1215 - protein, 263 aa, synthetic construct
  REGION 1..263: note = source = /note="Description of Artificial Sequence: Synthetic polypeptide"
MALPVTALLLPLALLLHAARPDVVMTQSPAFLSVTPGEKVTITCRASKSISKDLAWYQQKPDQAPKLLIYSGSTLQSGVPSRFSGSGSGTDFTFTISSLEAEDAATYYCQQHNKYPYTFGGGTKVEIKGGGGSGGGGSGGGGSGGGGSQVQLVQSGSELKKPGASVKVSCKASGYTFTSYWMNWVRQAPGQGLEWMGRIDPYDSETHYNQKFKDRFVFSVDKSVSTAYLQISSLKAEDTAVYYCARGNWDDYWGQGTTVTVSS

SEQ ID NO: 1216 - protein, 115 aa, synthetic construct; identical to SEQ ID NO: 1186
  REGION 1..115: note = source = /note="Description of Artificial Sequence: Synthetic polypeptide"

SEQ ID NO: 1217 - protein, 107 aa, synthetic construct; identical to SEQ ID NO: 1157
  REGION 1..107: note = source = /note="Description of Artificial Sequence: Synthetic polypeptide"

SEQ ID NO: 1218 - DNA, 1458 bp, synthetic construct
  misc_feature 1..1458: note = source = /note="Description of Artificial Sequence: Synthetic polynucleotide"
  source 1..1458: mol_type = other DNA
atggccctccctgtcaccgccctgctgcttccgctggctcttctgctccacgccgctcggcccgacgtggtcatgactcagtccccggactcactcgcggtgtcgcttggagagagagcgaccatcaactgtcgggcctcaaagagcatcagcaaggacctggcctggtaccagcagaagccgggacagccgccaaagctgctgatctactccgggtccaccttgcaatctggtgtccctgaccggttctccggttccgggtcgggtaccgacttcacgctcactatttcgtcgctgcaagccgaagatgtggccgtgtactattgccaacagcacaacaagtacccctacacttttggcggaggcaccaaggtggaaatcaaggggggtggcggtagcggaggagggggctccggcggcggcggctcagggggcggaggaagccaagtgcagctggtgcagtcaggcagcgaactgaagaagcccggagcctccgtcaaagtgtcctgcaaagcctcgggatacaccttcacctcctactggatgaactgggtccgccaggcacctggacaggggctggagtggatgggaaggatcgatccctacgattccgaaacccattacaatcagaagttcaaggaccggtttgtgttctccgtggacaagtccgtgtccaccgcctacctccaaattagcagcctgaaggcggaggatacagctgtctactactgcgctcgcggaaactgggatgactattggggccagggaactaccgtgactgtgtcctccaccactaccccagcaccgaggccacccaccccggctcctaccatcgcctcccagcctctgtccctgcgtccggaggcatgtagacccgcagctggtggggccgtgcatacccggggtcttgacttcgcctgcgatatctacatttgggcccctctggctggtacttgcggggtcctgctgctttcactcgtgatcactctttactgtaagcgcggtcggaagaagctgctgtacatctttaagcaacccttcatgaggcctgtgcagactactcaagaggaggacggctgttcatgccggttcccagaggaggaggaaggcggctgcgaactgcgcgtgaaattcagccgcagcgcagatgctccagcctacaagcaggggcagaaccagctctacaacgaactcaatcttggtcggagagaggagtacgacgtgctggacaagcggagaggacgggacccagaaatgggcgggaagccgcgcagaaagaatccccaagagggcctgtacaacgagctccaaaaggataagatggcagaagcctatagcgagattggtatgaaaggggaacgcagaagaggcaaaggccacgacggactgtaccagggactcagcaccgccaccaaggacacctatgacgctcttcacatgcaggccctgccgcctcgg

SEQ ID NO: 1219 - protein, 486 aa, synthetic construct
  REGION 1..486: note = source = /note="Description of Artificial Sequence: Synthetic polypeptide"
MALPVTALLLPLALLLHAARPDVVMTQSPDSLAVSLGERATINCRASKSISKDLAWYQQKPGQPPKLLIYSGSTLQSGVPDRFSGSGSGTDFTLTISSLQAEDVAVYYCQQHNKYPYTFGGGTKVEIKGGGGSGGGGSGGGGSGGGGSQVQLVQSGSELKKPGASVKVSCKASGYTFTSYWMNWVRQAPGQGLEWMGRIDPYDSETHYNQKFKDRFVFSVDKSVSTAYLQISSLKAEDTAVYYCARGNWDDYWGQGTTVTVSSTTTPAPRPPTPAPTIASQPLSLRPEACRPAAGGAVHTRGLDFACDIYIWAPLAGTCGVLLLSLVITLYCKRGRKKLLYIFKQPFMRPVQTTQEEDGCSCRFPEEEEGGCELRVKFSRSADAPAYKQGQNQLYNELNLGRREEYDVLDKRRGRDPEMGGKPRRKNPQEGLYNELQKDKMAEAYSEIGMKGERRRGKGHDGLYQGLSTATKDTYDALHMQALPPR

SEQ ID NO: 1220 - protein, 263 aa, synthetic construct
  REGION 1..263: note = source = /note="Description of Artificial Sequence: Synthetic polypeptide"
MALPVTALLLPLALLLHAARPDVVMTQSPDSLAVSLGERATINCRASKSISKDLAWYQQKPGQPPKLLIYSGSTLQSGVPDRFSGSGSGTDFTLTISSLQAEDVAVYYCQQHNKYPYTFGGGTKVEIKGGGGSGGGGSGGGGSGGGGSQVQLVQSGSELKKPGASVKVSCKASGYTFTSYWMNWVRQAPGQGLEWMGRIDPYDSETHYNQKFKDRFVFSVDKSVSTAYLQISSLKAEDTAVYYCARGNWDDYWGQGTTVTVSS

SEQ ID NO: 1221 - protein, 115 aa, synthetic construct; identical to SEQ ID NO: 1186
  REGION 1..115: note = source = /note="Description of Artificial Sequence: Synthetic polypeptide"

SEQ ID NO: 1222 - protein, 107 aa, synthetic construct; identical to SEQ ID NO: 1162
  REGION 1..107: note = source = /note="Description of Artificial Sequence: Synthetic polypeptide"

SEQ ID NO: 1223 - DNA, 1458 bp, synthetic construct
  misc_feature 1..1458: note = source = /note="Description of Artificial Sequence: Synthetic polynucleotide"
  source 1..1458: mol_type = other DNA
atggccctccctgtcaccgccctgctgcttccgctggctcttctgctccacgccgctcggcccgaggtgcagctggtgcagagcggagccgaggtcaagaagcctggagaatccctgaggatcagctgcaaaggcagcgggtataccttcacctcctactggatgaattgggtccgccagatgcccggaaaaggcctggagtggatgggacggattgacccctacgactcggaaacccattacaaccagaagttcaaggatcacgtgaccatctccgtggacaagtccatttccactgcgtacctccagtggtcaagcctgaaggcctccgacactgctatgtactactgcgcacgcggaaactgggatgattactggggacagggaacaaccgtgactgtgtcctccgggggtggcggtagcggaggagggggctccggcggcggcggctcagggggcggaggaagcgacgtgcagctcacccagtcgccctcatttctgtcggcctcagtgggagacagagtgaccattacttgtcgggcctccaagagcatctccaaggacctggcctggtatcagcagaagccaggaaaggcgcctaagttgctcatctactcggggtcgaccctgcaatctggcgtgccgtcccggttctccggttcgggaagcggtaccgaattcacccttactatctcctccctgcaaccggaggacttcgccacctactactgccaacagcacaacaagtacccgtacactttcgggggtggcacgaaggtcgaaatcaagaccactaccccagcaccgaggccacccaccccggctcctaccatcgcctcccagcctctgtccctgcgtccggaggcatgtagacccgcagctggtggggccgtgcatacccggggtcttgacttcgcctgcgatatctacatttgggcccctctggctggtacttgcggggtcctgctgctttcactcgtgatcactctttactgtaagcgcggtcggaagaagctgctgtacatctttaagcaacccttcatgaggcctgtgcagactactcaagaggaggacggctgttcatgccggttcccagaggaggaggaaggcggctgcgaactgcgcgtgaaattcagccgcagcgcagatgctccagcctacaagcaggggcagaaccagctctacaacgaactcaatcttggtcggagagaggagtacgacgtgctggacaagcggagaggacgggacccagaaatgggcgggaagccgcgcagaaagaatccccaagagggcctgtacaacgagctccaaaaggataagatggcagaagcctatagcgagattggtatgaaaggggaacgcagaagaggcaaaggccacgacggactgtaccagggactcagcaccgccaccaaggacacctatgacgctcttcacatgcaggccctgccgcctcgg

SEQ ID NO: 1224 - protein, 486 aa, synthetic construct
  REGION 1..486: note = source = /note="Description of Artificial Sequence: Synthetic polypeptide"
MALPVTALLLPLALLLHAARPEVQLVQSGAEVKKPGESLRISCKGSGYTFTSYWMNWVRQMPGKGLEWMGRIDPYDSETHYNQKFKDHVTISVDKSISTAYLQWSSLKASDTAMYYCARGNWDDYWGQGTTVTVSSGGGGSGGGGSGGGGSGGGGSDVQLTQSPSFLSASVGDRVTITCRASKSISKDLAWYQQKPGKAPKLLIYSGSTLQSGVPSRFSGSGSGTEFTLTISSLQPEDFATYYCQQHNKYPYTFGGGTKVEIKTTTPAPRPPTPAPTIASQPLSLRPEACRPAAGGAVHTRGLDFACDIYIWAPLAGTCGVLLLSLVITLYCKRGRKKLLYIFKQPFMRPVQTTQEEDGCSCRFPEEEEGGCELRVKFSRSADAPAYKQGQNQLYNELNLGRREEYDVLDKRRGRDPEMGGKPRRKNPQEGLYNELQKDKMAEAYSEIGMKGERRRGKGHDGLYQGLSTATKDTYDALHMQALPPR

SEQ ID NO: 1225 - protein, 263 aa, synthetic construct
  REGION 1..263: note = source = /note="Description of Artificial Sequence: Synthetic polypeptide"
MALPVTALLLPLALLLHAARPEVQLVQSGAEVKKPGESLRISCKGSGYTFTSYWMNWVRQMPGKGLEWMGRIDPYDSETHYNQKFKDHVTISVDKSISTAYLQWSSLKASDTAMYYCARGNWDDYWGQGTTVTVSSGGGGSGGGGSGGGGSGGGGSDVQLTQSPSFLSASVGDRVTITCRASKSISKDLAWYQQKPGKAPKLLIYSGSTLQSGVPSRFSGSGSGTEFTLTISSLQPEDFATYYCQQHNKYPYTFGGGTKVEIK

SEQ ID NO: 1226 - protein, 115 aa, synthetic construct
  REGION 1..115: note = source = /note="Description of Artificial Sequence: Synthetic polypeptide"
EVQLVQSGAEVKKPGESLRISCKGSGYTFTSYWMNWVRQMPGKGLEWMGRIDPYDSETHYNQKFKDHVTISVDKSISTAYLQWSSLKASDTAMYYCARGNWDDYWGQGTTVTVSS

SEQ ID NO: 1227 - protein, 107 aa, synthetic construct; identical to SEQ ID NO: 1147
  REGION 1..107: note = source = /note="Description of Artificial Sequence: Synthetic polypeptide"

SEQ ID NO: 1228 - DNA, 1458 bp, synthetic construct
  misc_feature 1..1458: note = source = /note="Description of Artificial Sequence: Synthetic polynucleotide"
  source 1..1458: mol_type = other DNA
atggccctccctgtcaccgccctgctgcttccgctggctcttctgctccacgccgctcggcccgaggtgcagctggtgcagagcggagccgaggtcaagaagcctggagaatccctgaggatcagctgcaaaggcagcgggtataccttcacctcctactggatgaattgggtccgccagatgcccggaaaaggcctggagtggatgggacggattgacccctacgactcggaaacccattacaaccagaagttcaaggatcacgtgaccatctccgtggacaagtccatttccactgcgtacctccagtggtcaagcctgaaggcctccgacactgctatgtactactgcgcacgcggaaactgggatgattactggggacagggaacaaccgtgactgtgtcctccgggggtggcggtagcggaggagggggctccggcggcggcggctcagggggcggaggaagcgaagtggtgctgacccagtcgcccgcaaccctctctctgtcgccgggagaacgcgccactctttcctgtcgggcgtccaagagcatctcaaaggacctcgcctggtaccagcagaagcctggtcaagccccgcggctgctgatctactccggctccacgctgcaatcaggaatcccagccagattttccggttcggggtcggggactgacttcaccttgaccattagctcgctggaacctgaggacttcgccgtgtattactgccagcagcacaacaagtacccgtacaccttcggaggcggtactaaggtcgagatcaagaccactaccccagcaccgaggccacccaccccggctcctaccatcgcctcccagcctctgtccctgcgtccggaggcatgtagacccgcagctggtggggccgtgcatacccggggtcttgacttcgcctgcgatatctacatttgggcccctctggctggtacttgcggggtcctgctgctttcactcgtgatcactctttactgtaagcgcggtcggaagaagctgctgtacatctttaagcaacccttcatgaggcctgtgcagactactcaagaggaggacggctgttcatgccggttcccagaggaggaggaaggcggctgcgaactgcgcgtgaaattcagccgcagcgcagatgctccagcctacaagcaggggcagaaccagctctacaacgaactcaatcttggtcggagagaggagtacgacgtgctggacaagcggagaggacgggacccagaaatgggcgggaagccgcgcagaaagaatccccaagagggcctgtacaacgagctccaaaaggataagatggcagaagcctatagcgagattggtatgaaaggggaacgcagaagaggcaaaggccacgacggactgtaccagggactcagcaccgccaccaaggacacctatgacgctcttcacatgcaggccctgccgcctcgg

SEQ ID NO: 1229 - protein, 486 aa, synthetic construct
  REGION 1..486: note = source = /note="Description of Artificial Sequence: Synthetic polypeptide"
MALPVTALLLPLALLLHAARPEVQLVQSGAEVKKPGESLRISCKGSGYTFTSYWMNWVRQMPGKGLEWMGRIDPYDSETHYNQKFKDHVTISVDKSISTAYLQWSSLKASDTAMYYCARGNWDDYWGQGTTVTVSSGGGGSGGGGSGGGGSGGGGSEVVLTQSPATLSLSPGERATLSCRASKSISKDLAWYQQKPGQAPRLLIYSGSTLQSGIPARFSGSGSGTDFTLTISSLEPEDFAVYYCQQHNKYPYTFGGGTKVEIKTTTPAPRPPTPAPTIASQPLSLRPEACRPAAGGAVHTRGLDFACDIYIWAPLAGTCGVLLLSLVITLYCKRGRKKLLYIFKQPFMRPVQTTQEEDGCSCRFPEEEEGGCELRVKFSRSADAPAYKQGQNQLYNELNLGRREEYDVLDKRRGRDPEMGGKPRRKNPQEGLYNELQKDKMAEAYSEIGMKGERRRGKGHDGLYQGLSTATKDTYDALHMQALPPR

SEQ ID NO: 1230 - protein, 263 aa, synthetic construct
  REGION 1..263: note = source = /note="Description of Artificial Sequence: Synthetic polypeptide"
MALPVTALLLPLALLLHAARPEVQLVQSGAEVKKPGESLRISCKGSGYTFTSYWMNWVRQMPGKGLEWMGRIDPYDSETHYNQKFKDHVTISVDKSISTAYLQWSSLKASDTAMYYCARGNWDDYWGQGTTVTVSSGGGGSGGGGSGGGGSGGGGSEVVLTQSPATLSLSPGERATLSCRASKSISKDLAWYQQKPGQAPRLLIYSGSTLQSGIPARFSGSGSGTDFTLTISSLEPEDFAVYYCQQHNKYPYTFGGGTKVEIK

SEQ ID NO: 1231 - protein, 115 aa, synthetic construct; identical to SEQ ID NO: 1226
  REGION 1..115: note = source = /note="Description of Artificial Sequence: Synthetic polypeptide"

SEQ ID NO: 1232 - protein, 107 aa, synthetic construct; identical to SEQ ID NO: 1152
  REGION 1..107: note = source = /note="Description of Artificial Sequence: Synthetic polypeptide"

SEQ ID NO: 1233 - DNA, 1458 bp, synthetic construct
  misc_feature 1..1458: note = source = /note="Description of Artificial Sequence: Synthetic polynucleotide"
  source 1..1458: mol_type = other DNA
atggccctccctgtcaccgccctgctgcttccgctggctcttctgctccacgccgctcggcccgaggtgcagctggtgcagagcggagccgaggtcaagaagcctggagaatccctgaggatcagctgcaaaggcagcgggtataccttcacctcctactggatgaattgggtccgccagatgcccggaaaaggcctggagtggatgggacggattgacccctacgactcggaaacccattacaaccagaagttcaaggatcacgtgaccatctccgtggacaagtccatttccactgcgtacctccagtggtcaagcctgaaggcctccgacactgctatgtactactgcgcacgcggaaactgggatgattactggggacagggaacaaccgtgactgtgtcctccgggggtggcggtagcggaggagggggctccggcggcggcggctcagggggcggaggaagcgacgtcgtgatgacccagtcaccggcattcctgtccgtgactcccggagaaaaggtcacgattacttgccgggcgtccaagagcatctccaaggacctcgcctggtaccaacagaagccggaccaggcccctaagctgttgatctactcggggtccacccttcaatcgggagtgccatcgcggtttagcggttcgggttctgggaccgacttcactttcaccatctcctcactggaagccgaggatgccgccacttactactgtcagcagcacaacaagtatccgtacaccttcggaggcggtaccaaagtggagatcaagaccactaccccagcaccgaggccacccaccccggctcctaccatcgcctcccagcctctgtccctgcgtccggaggcatgtagacccgcagctggtggggccgtgcatacccggggtcttgacttcgcctgcgatatctacatttgggcccctctggctggtacttgcggggtcctgctgctttcactcgtgatcactctttactgtaagcgcggtcggaagaagctgctgtacatctttaagcaacccttcatgaggcctgtgcagactactcaagaggaggacggctgttcatgccggttcccagaggaggaggaaggcggctgcgaactgcgcgtgaaattcagccgcagcgcagatgctccagcctacaagcaggggcagaaccagctctacaacgaactcaatcttggtcggagagaggagtacgacgtgctggacaagcggagaggacgggacccagaaatgggcgggaagccgcgcagaaagaatccccaagagggcctgtacaacgagctccaaaaggataagatggcagaagcctatagcgagattggtatgaaaggggaacgcagaagaggcaaaggccacgacggactgtaccagggactcagcaccgccaccaaggacacctatgacgctcttcacatgcaggccctgccgcctcgg

SEQ ID NO: 1234 - protein, 486 aa, synthetic construct
  REGION 1..486: note = source = /note="Description of Artificial Sequence: Synthetic polypeptide"
MALPVTALLLPLALLLHAARPEVQLVQSGAEVKKPGESLRISCKGSGYTFTSYWMNWVRQMPGKGLEWMGRIDPYDSETHYNQKFKDHVTISVDKSISTAYLQWSSLKASDTAMYYCARGNWDDYWGQGTTVTVSSGGGGSGGGGSGGGGSGGGGSDVVMTQSPAFLSVTPGEKVTITCRASKSISKDLAWYQQKPDQAPKLLIYSGSTLQSGVPSRFSGSGSGTDFTFTISSLEAEDAATYYCQQHNKYPYTFGGGTKVEIKTTTPAPRPPTPAPTIASQPLSLRPEACRPAAGGAVHTRGLDFACDIYIWAPLAGTCGVLLLSLVITLYCKRGRKKLLYIFKQPFMRPVQTTQEEDGCSCRFPEEEEGGCELRVKFSRSADAPAYKQGQNQLYNELNLGRREEYDVLDKRRGRDPEMGGKPRRKNPQEGLYNELQKDKMAEAYSEIGMKGERRRGKGHDGLYQGLSTATKDTYDALHMQALPPR

SEQ ID NO: 1235 - protein, 263 aa, synthetic construct
  REGION 1..263: note = source = /note="Description of Artificial Sequence: Synthetic polypeptide"
MALPVTALLLPLALLLHAARPEVQLVQSGAEVKKPGESLRISCKGSGYTFTSYWMNWVRQMPGKGLEWMGRIDPYDSETHYNQKFKDHVTISVDKSISTAYLQWSSLKASDTAMYYCARGNWDDYWGQGTTVTVSSGGGGSGGGGSGGGGSGGGGSDVVMTQSPAFLSVTPGEKVTITCRASKSISKDLAWYQQKPDQAPKLLIYSGSTLQSGVPSRFSGSGSGTDFTFTISSLEAEDAATYYCQQHNKYPYTFGGGTKVEIK

SEQ ID NO: 1236 - protein, 115 aa, synthetic construct; identical to SEQ ID NO: 1226
  REGION 1..115: note = source = /note="Description of Artificial Sequence: Synthetic polypeptide"

SEQ ID NO: 1237 - protein, 107 aa, synthetic construct; identical to SEQ ID NO: 1157
  REGION 1..107: note = source = /note="Description of Artificial Sequence: Synthetic polypeptide"

SEQ ID NO: 1238 - DNA, 1458 bp, synthetic construct
  misc_feature 1..1458: note = source = /note="Description of Artificial Sequence: Synthetic polynucleotide"
  source 1..1458: mol_type = other DNA
atggccctccctgtcaccgccctgctgcttccgctggctcttctgctccacgccgctcggcccgaggtgcagctggtgcagagcggagccgaggtcaagaagcctggagaatccctgaggatcagctgcaaaggcagcgggtataccttcacctcctactggatgaattgggtccgccagatgcccggaaaaggcctggagtggatgggacggattgacccctacgactcggaaacccattacaaccagaagttcaaggatcacgtgaccatctccgtggacaagtccatttccactgcgtacctccagtggtcaagcctgaaggcctccgacactgctatgtactactgcgcacgcggaaactgggatgattactggggacagggaacaaccgtgactgtgtcctccgggggtggcggtagcggaggagggggctccggcggcggcggctcagggggcggaggaagcgacgtggtcatgactcagtccccggactcactcgcggtgtcgcttggagagagagcgaccatcaactgtcgggcctcaaagagcatcagcaaggacctggcctggtaccagcagaagccgggacagccgccaaagctgctgatctactccgggtccaccttgcaatctggtgtccctgaccggttctccggttccgggtcgggtaccgacttcacgctcactatttcgtcgctgcaagccgaagatgtggccgtgtactattgccaacagcacaacaagtacccctacacttttggcggaggcaccaaggtggaaatcaagaccactaccccagcaccgaggccacccaccccggctcctaccatcgcctcccagcctctgtccctgcgtccggaggcatgtagacccgcagctggtggggccgtgcatacccggggtcttgacttcgcctgcgatatctacatttgggcccctctggctggtacttgcggggtcctgctgctttcactcgtgatcactctttactgtaagcgcggtcggaagaagctgctgtacatctttaagcaacccttcatgaggcctgtgcagactactcaagaggaggacggctgttcatgccggttcccagaggaggaggaaggcggctgcgaactgcgcgtgaaattcagccgcagcgcagatgctccagcctacaagcaggggcagaaccagctctacaacgaactcaatcttggtcggagagaggagtacgacgtgctggacaagcggagaggacgggacccagaaatgggcgggaagccgcgcagaaagaatccccaagagggcctgtacaacgagctccaaaaggataagatggcagaagcctatagcgagattggtatgaaaggggaacgcagaagaggcaaaggccacgacggactgtaccagggactcagcaccgccaccaaggacacctatgacgctcttcacatgcaggccctgccgcctcgg

SEQ ID NO: 1239 - protein, 486 aa, synthetic construct
  REGION 1..486: note = source = /note="Description of Artificial Sequence: Synthetic polypeptide"
MALPVTALLLPLALLLHAARPEVQLVQSGAEVKKPGESLRISCKGSGYTFTSYWMNWVRQMPGKGLEWMGRIDPYDSETHYNQKFKDHVTISVDKSISTAYLQWSSLKASDTAMYYCARGNWDDYWGQGTTVTVSSGGGGSGGGGSGGGGSGGGGSDVVMTQSPDSLAVSLGERATINCRASKSISKDLAWYQQKPGQPPKLLIYSGSTLQSGVPDRFSGSGSGTDFTLTISSLQAEDVAVYYCQQHNKYPYTFGGGTKVEIKTTTPAPRPPTPAPTIASQPLSLRPEACRPAAGGAVHTRGLDFACDIYIWAPLAGTCGVLLLSLVITLYCKRGRKKLLYIFKQPFMRPVQTTQEEDGCSCRFPEEEEGGCELRVKFSRSADAPAYKQGQNQLYNELNLGRREEYDVLDKRRGRDPEMGGKPRRKNPQEGLYNELQKDKMAEAYSEIGMKGERRRGKGHDGLYQGLSTATKDTYDALHMQALPPR

SEQ ID NO: 1240 - protein, 263 aa, synthetic construct
  REGION 1..263: note = source = /note="Description of Artificial Sequence: Synthetic polypeptide"
MALPVTALLLPLALLLHAARPEVQLVQSGAEVKKPGESLRISCKGSGYTFTSYWMNWVRQMPGKGLEWMGRIDPYDSETHYNQKFKDHVTISVDKSISTAYLQWSSLKASDTAMYYCARGNWDDYWGQGTTVTVSSGGGGSGGGGSGGGGSGGGGSDVVMTQSPDSLAVSLGERATINCRASKSISKDLAWYQQKPGQPPKLLIYSGSTLQSGVPDRFSGSGSGTDFTLTISSLQAEDVAVYYCQQHNKYPYTFGGGTKVEIK

SEQ ID NO: 1241 - protein, 115 aa, synthetic construct; identical to SEQ ID NO: 1226
  REGION 1..115: note = source = /note="Description of Artificial Sequence: Synthetic polypeptide"

SEQ ID NO: 1242 - protein, 107 aa, synthetic construct; identical to SEQ ID NO: 1162
  REGION 1..107: note = source = /note="Description of Artificial Sequence: Synthetic polypeptide"

SEQ ID NO: 1243 - DNA, 1458 bp, synthetic construct
  misc_feature 1..1458: note = source = /note="Description of Artificial Sequence: Synthetic polynucleotide"
  source 1..1458: mol_type = other DNA
atggccctccctgtcaccgccctgctgcttccgctggctcttctgctccacgccgctcggcccgacgtgcagctcacccagtcgccctcatttctgtcggcctcagtgggagacagagtgaccattacttgtcgggcctccaagagcatctccaaggacctggcctggtatcagcagaagccaggaaaggcgcctaagttgctcatctactcggggtcgaccctgcaatctggcgtgccgtcccggttctccggttcgggaagcggtaccgaattcacccttactatctcctccctgcaaccggaggacttcgccacctactactgccaacagcacaacaagtacccgtacactttcgggggtggcacgaaggtcgaaatcaaggggggtggcggtagcggaggagggggctccggcggcggcggctcagggggcggaggaagcgaggtgcagctggtgcagagcggagccgaggtcaagaagcctggagaatccctgaggatcagctgcaaaggcagcgggtataccttcacctcctactggatgaattgggtccgccagatgcccggaaaaggcctggagtggatgggacggattgacccctacgactcggaaacccattacaaccagaagttcaaggatcacgtgaccatctccgtggacaagtccatttccactgcgtacctccagtggtcaagcctgaaggcctccgacactgctatgtactactgcgcacgcggaaactgggatgattactggggacagggaacaaccgtgactgtgtcctccaccactaccccagcaccgaggccacccaccccggctcctaccatcgcctcccagcctctgtccctgcgtccggaggcatgtagacccgcagctggtggggccgtgcatacccggggtcttgacttcgcctgcgatatctacatttgggcccctctggctggtacttgcggggtcctgctgctttcactcgtgatcactctttactgtaagcgcggtcggaagaagctgctgtacatctttaagcaacccttcatgaggcctgtgcagactactcaagaggaggacggctgttcatgccggttcccagaggaggaggaaggcggctgcgaactgcgcgtgaaattcagccgcagcgcagatgctccagcctacaagcaggggcagaaccagctctacaacgaactcaatcttggtcggagagaggagtacgacgtgctggacaagcggagaggacgggacccagaaatgggcgggaagccgcgcagaaagaatccccaagagggcctgtacaacgagctccaaaaggataagatggcagaagcctatagcgagattggtatgaaaggggaacgcagaagaggcaaaggccacgacggactgtaccagggactcagcaccgccaccaaggacacctatgacgctcttcacatgcaggccctgccgcctcgg

SEQ ID NO: 1244 - protein, 486 aa, synthetic construct
  REGION 1..486: note = source = /note="Description of Artificial Sequence: Synthetic polypeptide"
MALPVTALLLPLALLLHAARPDVQLTQSPSFLSASVGDRVTITCRASKSISKDLAWYQQKPGKAPKLLIYSGSTLQSGVPSRFSGSGSGTEFTLTISSLQPEDFATYYCQQHNKYPYTFGGGTKVEIKGGGGSGGGGSGGGGSGGGGSEVQLVQSGAEVKKPGESLRISCKGSGYTFTSYWMNWVRQMPGKGLEWMGRIDPYDSETHYNQKFKDHVTISVDKSISTAYLQWSSLKASDTAMYYCARGNWDDYWGQGTTVTVSSTTTPAPRPPTPAPTIASQPLSLRPEACRPAAGGAVHTRGLDFACDIYIWAPLAGTCGVLLLSLVITLYCKRGRKKLLYIFKQPFMRPVQTTQEEDGCSCRFPEEEEGGCELRVKFSRSADAPAYKQGQNQLYNELNLGRREEYDVLDKRRGRDPEMGGKPRRKNPQEGLYNELQKDKMAEAYSEIGMKGERRRGKGHDGLYQGLSTATKDTYDALHMQALPPR

SEQ ID NO: 1245 - protein, 263 aa, synthetic construct
  REGION 1..263: note = source = /note="Description of Artificial Sequence: Synthetic polypeptide"
MALPVTALLLPLALLLHAARPDVQLTQSPSFLSASVGDRVTITCRASKSISKDLAWYQQKPGKAPKLLIYSGSTLQSGVPSRFSGSGSGTEFTLTISSLQPEDFATYYCQQHNKYPYTFGGGTKVEIKGGGGSGGGGSGGGGSGGGGSEVQLVQSGAEVKKPGESLRISCKGSGYTFTSYWMNWVRQMPGKGLEWMGRIDPYDSETHYNQKFKDHVTISVDKSISTAYLQWSSLKASDTAMYYCARGNWDDYWGQGTTVTVSS

SEQ ID NO: 1246 - protein, 115 aa, synthetic construct; identical to SEQ ID NO: 1226
  REGION 1..115: note = source = /note="Description of Artificial Sequence: Synthetic polypeptide"

SEQ ID NO: 1247 - protein, 107 aa, synthetic construct; identical to SEQ ID NO: 1147
  REGION 1..107: note = source = /note="Description of Artificial Sequence: Synthetic polypeptide"

SEQ ID NO: 1248 - DNA, 1458 bp, synthetic construct
  misc_feature 1..1458: note = source = /note="Description of Artificial Sequence: Synthetic polynucleotide"
  source 1..1458: mol_type = other DNA
atggccctccctgtcaccgccctgctgcttccgctggctcttctgctccacgccgctcggcccgaagtggtgctgacccagtcgcccgcaaccctctctctgtcgccgggagaacgcgccactctttcctgtcgggcgtccaagagcatctcaaaggacctcgcctggtaccagcagaagcctggtcaagccccgcggctgctgatctactccggctccacgctgcaatcaggaatcccagccagattttccggttcggggtcggggactgacttcaccttgaccattagctcgctggaacctgaggacttcgccgtgtattactgccagcagcacaacaagtacccgtacaccttcggaggcggtactaaggtcgagatcaaggggggtggcggtagcggaggagggggctccggcggcggcggctcagggggcggaggaagcgaggtgcagctggtgcagagcggagccgaggtcaagaagcctggagaatccctgaggatcagctgcaaaggcagcgggtataccttcacctcctactggatgaattgggtccgccagatgcccggaaaaggcctggagtggatgggacggattgacccctacgactcggaaacccattacaaccagaagttcaaggatcacgtgaccatctccgtggacaagtccatttccactgcgtacctccagtggtcaagcctgaaggcctccgacactgctatgtactactgcgcacgcggaaactgggatgattactggggacagggaacaaccgtgactgtgtcctccaccactaccccagcaccgaggccacccaccccggctcctaccatcgcctcccagcctctgtccctgcgtccggaggcatgtagacccgcagctggtggggccgtgcatacccggggtcttgacttcgcctgcgatatctacatttgggcccctctggctggtacttgcggggtcctgctgctttcactcgtgatcactctttactgtaagcgcggtcggaagaagctgctgtacatctttaagcaacccttcatgaggcctgtgcagactactcaagaggaggacggctgttcatgccggttcccagaggaggaggaaggcggctgcgaactgcgcgtgaaattcagccgcagcgcagatgctccagcctacaagcaggggcagaaccagctctacaacgaactcaatcttggtcggagagaggagtacgacgtgctggacaagcggagaggacgggacccagaaatgggcgggaagccgcgcagaaagaatccccaagagggcctgtacaacgagctccaaaaggataagatggcagaagcctatagcgagattggtatgaaaggggaacgcagaagaggcaaaggccacgacggactgtaccagggactcagcaccgccaccaaggacacctatgacgctcttcacatgcaggccctgccgcctcgg

SEQ ID NO: 1249 - protein, 486 aa, synthetic construct
  REGION 1..486: note = source = /note="Description of Artificial Sequence: Synthetic polypeptide"
MALPVTALLLPLALLLHAARPEVVLTQSPATLSLSPGERATLSCRASKSISKDLAWYQQKPGQAPRLLIYSGSTLQSGIPARFSGSGSGTDFTLTISSLEPEDFAVYYCQQHNKYPYTFGGGTKVEIKGGGGSGGGGSGGGGSGGGGSEVQLVQSGAEVKKPGESLRISCKGSGYTFTSYWMNWVRQMPGKGLEWMGRIDPYDSETHYNQKFKDHVTISVDKSISTAYLQWSSLKASDTAMYYCARGNWDDYWGQGTTVTVSSTTTPAPRPPTPAPTIASQPLSLRPEACRPAAGGAVHTRGLDFACDIYIWAPLAGTCGVLLLSLVITLYCKRGRKKLLYIFKQPFMRPVQTTQEEDGCSCRFPEEEEGGCELRVKFSRSADAPAYKQGQNQLYNELNLGRREEYDVLDKRRGRDPEMGGKPRRKNPQEGLYNELQKDKMAEAYSEIGMKGERRRGKGHDGLYQGLSTATKDTYDALHMQALPPR

SEQ ID NO: 1250 - protein, 263 aa, synthetic construct
  REGION 1..263: note = source = /note="Description of Artificial Sequence: Synthetic polypeptide"
MALPVTALLLPLALLLHAARPEVVLTQSPATLSLSPGERATLSCRASKSISKDLAWYQQKPGQAPRLLIYSGSTLQSGIPARFSGSGSGTDFTLTISSLEPEDFAVYYCQQHNKYPYTFGGGTKVEIKGGGGSGGGGSGGGGSGGGGSEVQLVQSGAEVKKPGESLRISCKGSGYTFTSYWMNWVRQMPGKGLEWMGRIDPYDSETHYNQKFKDHVTISVDKSISTAYLQWSSLKASDTAMYYCARGNWDDYWGQGTTVTVSS

SEQ ID NO: 1251 - protein, 115 aa, synthetic construct; identical to SEQ ID NO: 1226
  REGION 1..115: note = source = /note="Description of Artificial Sequence: Synthetic polypeptide"

SEQ ID NO: 1252 - protein, 107 aa, synthetic construct; identical to SEQ ID NO: 1152
  REGION 1..107: note = source = /note="Description of Artificial Sequence: Synthetic polypeptide"

SEQ ID NO: 1253 - DNA, 1458 bp, synthetic construct
  misc_feature 1..1458: note = source = /note="Description of Artificial Sequence: Synthetic polynucleotide"
  source 1..1458: mol_type = other DNA
atggccctccctgtcaccgccctgctgcttccgctggctcttctgctccacgccgctcggcccgacgtcgtgatgacccagtcaccggcattcctgtccgtgactcccggagaaaaggtcacgattacttgccgggcgtccaagagcatctccaaggacctcgcctggtaccaacagaagccggaccaggcccctaagctgttgatctactcggggtccacccttcaatcgggagtgccatcgcggtttagcggttcgggttctgggaccgacttcactttcaccatctcctcactggaagccgaggatgccgccacttactactgtcagcagcacaacaagtatccgtacaccttcggaggcggtaccaaagtggagatcaaggggggtggcggtagcggaggagggggctccggcggcggcggctcagggggcggaggaagcgaggtgcagctggtgcagagcggagccgaggtcaagaagcctggagaatccctgaggatcagctgcaaaggcagcgggtataccttcacctcctactggatgaattgggtccgccagatgcccggaaaaggcctggagtggatgggacggattgacccctacgactcggaaacccattacaaccagaagttcaaggatcacgtgaccatctccgtggacaagtccatttccactgcgtacctccagtggtcaagcctgaaggcctccgacactgctatgtactactgcgcacgcggaaactgggatgattactggggacagggaacaaccgtgactgtgtcctccaccactaccccagcaccgaggccacccaccccggctcctaccatcgcctcccagcctctgtccctgcgtccggaggcatgtagacccgcagctggtggggccgtgcatacccggggtcttgacttcgcctgcgatatctacatttgggcccctctggctggtacttgcggggtcctgctgctttcactcgtgatcactctttactgtaagcgcggtcggaagaagctgctgtacatctttaagcaacccttcatgaggcctgtgcagactactcaagaggaggacggctgttcatgccggttcccagaggaggaggaaggcggctgcgaactgcgcgtgaaattcagccgcagcgcagatgctccagcctacaagcaggggcagaaccagctctacaacgaactcaatcttggtcggagagaggagtacgacgtgctggacaagcggagaggacgggacccagaaatgggcgggaagccgcgcagaaagaatccccaagagggcctgtacaacgagctccaaaaggataagatggcagaagcctatagcgagattggtatgaaaggggaacgcagaagaggcaaaggccacgacggactgtaccagggactcagcaccgccaccaaggacacctatgacgctcttcacatgcaggccctgccgcctcgg

SEQ ID NO: 1254 - protein, 486 aa, synthetic construct
  REGION 1..486: note = source = /note="Description of Artificial Sequence: Synthetic polypeptide"
MALPVTALLLPLALLLHAARPDVVMTQSPAFLSVTPGEKVTITCRASKSISKDLAWYQQKPDQAPKLLIYSGSTLQSGVPSRFSGSGSGTDFTFTISSLEAEDAATYYCQQHNKYPYTFGGGTKVEIKGGGGSGGGGSGGGGSGGGGSEVQLVQSGAEVKKPGESLRISCKGSGYTFTSYWMNWVRQMPGKGLEWMGRIDPYDSETHYNQKFKDHVTISVDKSISTAYLQWSSLKASDTAMYYCARGNWDDYWGQGTTVTVSSTTTPAPRPPTPAPTIASQPLSLRPEACRPAAGGAVHTRGLDFACDIYIWAPLAGTCGVLLLSLVITLYCKRGRKKLLYIFKQPFMRPVQTTQEEDGCSCRFPEEEEGGCELRVKFSRSADAPAYKQGQNQLYNELNLGRREEYDVLDKRRGRDPEMGGKPRRKNPQEGLYNELQKDKMAEAYSEIGMKGERRRGKGHDGLYQGLSTATKDTYDALHMQALPPR

SEQ ID NO: 1255 - protein, 263 aa, synthetic construct
  REGION 1..263: note = source = /note="Description of Artificial Sequence: Synthetic polypeptide"
MALPVTALLLPLALLLHAARPDVVMTQSPAFLSVTPGEKVTITCRASKSISKDLAWYQQKPDQAPKLLIYSGSTLQSGVPSRFSGSGSGTDFTFTISSLEAEDAATYYCQQHNKYPYTFGGGTKVEIKGGGGSGGGGSGGGGSGGGGSEVQLVQSGAEVKKPGESLRISCKGSGYTFTSYWMNWVRQMPGKGLEWMGRIDPYDSETHYNQKFKDHVTISVDKSISTAYLQWSSLKASDTAMYYCARGNWDDYWGQGTTVTVSS

SEQ ID NO: 1256 - protein, 115 aa, synthetic construct; identical to SEQ ID NO: 1226
  REGION 1..115: note = source = /note="Description of Artificial Sequence: Synthetic polypeptide"

SEQ ID NO: 1257 - protein, 107 aa, synthetic construct; identical to SEQ ID NO: 1157
  REGION 1..107: note = source = /note="Description of Artificial Sequence: Synthetic polypeptide"

SEQ ID NO: 1258 - DNA, 1458 bp, synthetic construct
  misc_feature 1..1458: note = source = /note="Description of Artificial Sequence: Synthetic polynucleotide"
  source 1..1458: mol_type = other DNA
atggccctccctgtcaccgccctgctgcttccgctggctcttctgctccacgccgctcggcccgacgtggtcatgactcagtccccggactcactcgcggtgtcgcttggagagagagcgaccatcaactgtcgggcctcaaagagcatcagcaaggacctggcctggtaccagcagaagccgggacagccgccaaagctgctgatctactccgggtccaccttgcaatctggtgtccctgaccggttctccggttccgggtcgggtaccgacttcacgctcactatttcgtcgctgcaagccgaagatgtggccgtgtactattgccaacagcacaacaagtacccctacacttttggcggaggcaccaaggtggaaatcaaggggggtggcggtagcggaggagggggctccggcggcggcggctcagggggcggaggaagcgaggtgcagctggtgcagagcggagccgaggtcaagaagcctggagaatccctgaggatcagctgcaaaggcagcgggtataccttcacctcctactggatgaattgggtccgccagatgcccggaaaaggcctggagtggatgggacggattgacccctacgactcggaaacccattacaaccagaagttcaaggatcacgtgaccatctccgtggacaagtccatttccactgcgtacctccagtggtcaagcctgaaggcctccgacactgctatgtactactgcgcacgcggaaactgggatgattactggggacagggaacaaccgtgactgtgtcctccaccactaccccagcaccgaggccacccaccccggctcctaccatcgcctcccagcctctgtccctgcgtccggaggcatgtagacccgcagctggtggggccgtgcatacccggggtcttgacttcgcctgcgatatctacatttgggcccctctggctggtacttgcggggtcctgctgctttcactcgtgatcactctttactgtaagcgcggtcggaagaagctgctgtacatctttaagcaacccttcatgaggcctgtgcagactactcaagaggaggacggctgttcatgccggttcccagaggaggaggaaggcggctgcgaactgcgcgtgaaattcagccgcagcgcagatgctccagcctacaagcaggggcagaaccagctctacaacgaactcaatcttggtcggagagaggagtacgacgtgctggacaagcggagaggacgggacccagaaatgggcgggaagccgcgcagaaagaatccccaagagggcctgtacaacgagctccaaaaggataagatggcagaagcctatagcgagattggtatgaaaggggaacgcagaagaggcaaaggccacgacggactgtaccagggactcagcaccgccaccaaggacacctatgacgctcttcacatgcaggccctgccgcctcgg

SEQ ID NO: 1259 - protein, 486 aa, synthetic construct
  REGION 1..486: note = source = /note="Description of Artificial Sequence: Synthetic polypeptide"
MALPVTALLLPLALLLHAARPDVVMTQSPDSLAVSLGERATINCRASKSISKDLAWYQQKPGQPPKLLIYSGSTLQSGVPDRFSGSGSGTDFTLTISSLQAEDVAVYYCQQHNKYPYTFGGGTKVEIKGGGGSGGGGSGGGGSGGGGSEVQLVQSGAEVKKPGESLRISCKGSGYTFTSYWMNWVRQMPGKGLEWMGRIDPYDSETHYNQKFKDHVTISVDKSISTAYLQWSSLKASDTAMYYCARGNWDDYWGQGTTVTVSSTTTPAPRPPTPAPTIASQPLSLRPEACRPAAGGAVHTRGLDFACDIYIWAPLAGTCGVLLLSLVITLYCKRGRKKLLYIFKQPFMRPVQTTQEEDGCSCRFPEEEEGGCELRVKFSRSADAPAYKQGQNQLYNELNLGRREEYDVLDKRRGRDPEMGGKPRRKNPQEGLYNELQKDKMAEAYSEIGMKGERRRGKGHDGLYQGLSTATKDTYDALHMQALPPR

SEQ ID NO: 1260 - protein, 263 aa, synthetic construct
  REGION 1..263: note = source = /note="Description of Artificial Sequence: Synthetic polypeptide"
MALPVTALLLPLALLLHAARPDVVMTQSPDSLAVSLGERATINCRASKSISKDLAWYQQKPGQPPKLLIYSGSTLQSGVPDRFSGSGSGTDFTLTISSLQAEDVAVYYCQQHNKYPYTFGGGTKVEIKGGGGSGGGGSGGGGSGGGGSEVQLVQSGAEVKKPGESLRISCKGSGYTFTSYWMNWVRQMPGKGLEWMGRIDPYDSETHYNQKFKDHVTISVDKSISTAYLQWSSLKASDTAMYYCARGNWDDYWGQGTTVTVSS

SEQ ID NO: 1261 - protein, 115 aa, synthetic construct; identical to SEQ ID NO: 1226
  REGION 1..115: note = source = /note="Description of Artificial Sequence: Synthetic polypeptide"

SEQ ID NO: 1262 - protein, 107 aa, synthetic construct; identical to SEQ ID NO: 1162
  REGION 1..107: note = source = /note="Description of Artificial Sequence: Synthetic polypeptide"

SEQ ID NO: 1263 - DNA, 1458 bp, synthetic construct
  misc_feature 1..1458: note = source = /note="Description of Artificial Sequence: Synthetic polynucleotide"
  source 1..1458: mol_type = other DNA
atggccctccctgtcaccgccctgctgcttccgctggctcttctgctccacgccgctcggcccgaagtgcagctcgtcgagagcggagggggactggtgcagcccggaggaagcctgaggctgtcctgcgctgcctccggctacaccttcacctcctactggatgaactgggtcagacaggcacctggaaagggactggtctgggtgtcgcgcattgacccctacgactccgaaacccattacaatcagaaattcaaggaccgcttcaccatctccgtggacaaagccaagagcaccgcgtacctccaaatgaactccctgcgcgctgaggatacagcagtgtactattgcgcccggggaaactgggatgattactggggccagggaactactgtgactgtgtcatccgggggtggcggtagcggaggagggggctccggcggcggcggctcagggggcggaggaagcgacgtgcagctcacccagtcgccctcatttctgtcggcctcagtgggagacagagtgaccattacttgtcgggcctccaagagcatctccaaggacctggcctggtatcagcagaagccaggaaaggcgcctaagttgctcatctactcggggtcgaccctgcaatctggcgtgccgtcccggttctccggttcgggaagcggtaccgaattcacccttactatctcctccctgcaaccggaggacttcgccacctactactgccaacagcacaacaagtacccgtacactttcgggggtggcacgaaggtcgaaatcaagaccactaccccagcaccgaggccacccaccccggctcctaccatcgcctcccagcctctgtccctgcgtccggaggcatgtagacccgcagctggtggggccgtgcatacccggggtcttgacttcgcctgcgatatctacatttgggcccctctggctggtacttgcggggtcctgctgctttcactcgtgatcactctttactgtaagcgcggtcggaagaagctgctgtacatctttaagcaacccttcatgaggcctgtgcagactactcaagaggaggacggctgttcatgccggttcccagaggaggaggaaggcggctgcgaactgcgcgtgaaattcagccgcagcgcagatgctccagcctacaagcaggggcagaaccagctctacaacgaactcaatcttggtcggagagaggagtacgacgtgctggacaagcggagaggacgggacccagaaatgggcgggaagccgcgcagaaagaatccccaagagggcctgtacaacgagctccaaaaggataagatggcagaagcctatagcgagattggtatgaaaggggaacgcagaagaggcaaaggccacgacggactgtaccagggactcagcaccgccaccaaggacacctatgacgctcttcacatgcaggccctgccgcctcgg

SEQ ID NO: 1264 - protein, 486 aa, synthetic construct
  REGION 1..486: note = source = /note="Description of Artificial Sequence: Synthetic polypeptide"
MALPVTALLLPLALLLHAARPEVQLVESGGGLVQPGGSLRLSCAASGYTFTSYWMNWVRQAPGKGLVWVSRIDPYDSETHYNQKFKDRFTISVDKAKSTAYLQMNSLRAEDTAVYYCARGNWDDYWGQGTTVTVSSGGGGSGGGGSGGGGSGGGGSDVQLTQSPSFLSASVGDRVTITCRASKSISKDLAWYQQKPGKAPKLLIYSGSTLQSGVPSRFSGSGSGTEFTLTISSLQPEDFATYYCQQHNKYPYTFGGGTKVEIKTTTPAPRPPTPAPTIASQPLSLRPEACRPAAGGAVHTRGLDFACDIYIWAPLAGTCGVLLLSLVITLYCKRGRKKLLYIFKQPFMRPVQTTQEEDGCSCRFPEEEEGGCELRVKFSRSADAPAYKQGQNQLYNELNLGRREEYDVLDKRRGRDPEMGGKPRRKNPQEGLYNELQKDKMAEAYSEIGMKGERRRGKGHDGLYQGLSTATKDTYDALHMQALPPR

SEQ ID NO: 1265 - protein, 263 aa, synthetic construct
  REGION 1..263: note = source = /note="Description of Artificial Sequence: Synthetic polypeptide"
MALPVTALLLPLALLLHAARPEVQLVESGGGLVQPGGSLRLSCAASGYTFTSYWMNWVRQAPGKGLVWVSRIDPYDSETHYNQKFKDRFTISVDKAKSTAYLQMNSLRAEDTAVYYCARGNWDDYWGQGTTVTVSSGGGGSGGGGSGGGGSGGGGSDVQLTQSPSFLSASVGDRVTITCRASKSISKDLAWYQQKPGKAPKLLIYSGSTLQSGVPSRFSGSGSGTEFTLTISSLQPEDFATYYCQQHNKYPYTFGGGTKVEIK

SEQ ID NO: 1266 - protein, 115 aa, synthetic construct
  REGION 1..115: note = source = /note="Description of Artificial Sequence: Synthetic polypeptide"
EVQLVESGGGLVQPGGSLRLSCAASGYTFTSYWMNWVRQAPGKGLVWVSRIDPYDSETHYNQKFKDRFTISVDKAKSTAYLQMNSLRAEDTAVYYCARGNWDDYWGQGTTVTVSS

SEQ ID NO: 1267 - protein, 107 aa, synthetic construct; identical to SEQ ID NO: 1147
  REGION 1..107: note = source = /note="Description of Artificial Sequence: Synthetic polypeptide"

SEQ ID NO: 1268 - DNA, 1458 bp, synthetic construct
  misc_feature 1..1458: note = source = /note="Description of Artificial Sequence: Synthetic polynucleotide"
  source 1..1458: mol_type = other DNA
atggccctccctgtcaccgccctgctgcttccgctggctcttctgctccacgccgctcggcccgaagtgcagctcgtcgagagcggagggggactggtgcagcccggaggaagcctgaggctgtcctgcgctgcctccggctacaccttcacctcctactggatgaactgggtcagacaggcacctggaaagggactggtctgggtgtcgcgcattgacccctacgactccgaaacccattacaatcagaaattcaaggaccgcttcaccatctccgtggacaaagccaagagcaccgcgtacctccaaatgaactccctgcgcgctgaggatacagcagtgtactattgcgcccggggaaactgggatgattactggggccagggaactactgtgactgtgtcatccgggggtggcggtagcggaggagggggctccggcggcggcggctcagggggcggaggaagcgaagtggtgctgacccagtcgcccgcaaccctctctctgtcgccgggagaacgcgccactctttcctgtcgggcgtccaagagcatctcaaaggacctcgcctggtaccagcagaagcctggtcaagccccgcggctgctgatctactccggctccacgctgcaatcaggaatcccagccagattttccggttcggggtcggggactgacttcaccttgaccattagctcgctggaacctgaggacttcgccgtgtattactgccagcagcacaacaagtacccgtacaccttcggaggcggtactaaggtcgagatcaagaccactaccccagcaccgaggccacccaccccggctcctaccatcgcctcccagcctctgtccctgcgtccggaggcatgtagacccgcagctggtggggccgtgcatacccggggtcttgacttcgcctgcgatatctacatttgggcccctctggctggtacttgcggggtcctgctgctttcactcgtgatcactctttactgtaagcgcggtcggaagaagctgctgtacatctttaagcaacccttcatgaggcctgtgcagactactcaagaggaggacggctgttcatgccggttcccagaggaggaggaaggcggctgcgaactgcgcgtgaaattcagccgcagcgcagatgctccagcctacaagcaggggcagaaccagctctacaacgaactcaatcttggtcggagagaggagtacgacgtgctggacaagcggagaggacgggacccagaaatgggcgggaagccgcgcagaaagaatccccaagagggcctgtacaacgagctccaaaaggataagatggcagaagcctatagcgagattggtatgaaaggggaacgcagaagaggcaaaggccacgacggactgtaccagggactcagcaccgccaccaaggacacctatgacgctcttcacatgcaggccctgccgcctcgg

SEQ ID NO: 1269 - protein, 486 aa, synthetic construct
  REGION 1..486: note = source = /note="Description of Artificial Sequence: Synthetic polypeptide"
MALPVTALLLPLALLLHAARPEVQLVESGGGLVQPGGSLRLSCAASGYTFTSYWMNWVRQAPGKGLVWVSRIDPYDSETHYNQKFKDRFTISVDKAKSTAYLQMNSLRAEDTAVYYCARGNWDDYWGQGTTVTVSSGGGGSGGGGSGGGGSGGGGSEVVLTQSPATLSLSPGERATLSCRASKSISKDLAWYQQKPGQAPRLLIYSGSTLQSGIPARFSGSGSGTDFTLTISSLEPEDFAVYYCQQHNKYPYTFGGGTKVEIKTTTPAPRPPTPAPTIASQPLSLRPEACRPAAGGAVHTRGLDFACDIYIWAPLAGTCGVLLLSLVITLYCKRGRKKLLYIFKQPFMRPVQTTQEEDGCSCRFPEEEEGGCELRVKFSRSADAPAYKQGQNQLYNELNLGRREEYDVLDKRRGRDPEMGGKPRRKNPQEGLYNELQKDKMAEAYSEIGMKGERRRGKGHDGLYQGLSTATKDTYDALHMQALPPR

SEQ ID NO: 1270 - protein, 263 aa, synthetic construct
  REGION 1..263: note = source = /note="Description of Artificial Sequence: Synthetic polypeptide"
MALPVTALLLPLALLLHAARPEVQLVESGGGLVQPGGSLRLSCAASGYTFTSYWMNWVRQAPGKGLVWVSRIDPYDSETHYNQKFKDRFTISVDKAKSTAYLQMNSLRAEDTAVYYCARGNWDDYWGQGTTVTVSSGGGGSGGGGSGGGGSGGGGSEVVLTQSPATLSLSPGERATLSCRASKSISKDLAWYQQKPGQAPRLLIYSGSTLQSGIPARFSGSGSGTDFTLTISSLEPEDFAVYYCQQHNKYPYTFGGGTKVEIK

SEQ ID NO: 1271 - protein, 115 aa, synthetic construct; identical to SEQ ID NO: 1266
  REGION 1..115: note = source = /note="Description of Artificial Sequence: Synthetic polypeptide"

SEQ ID NO: 1272 - protein, 107 aa, synthetic construct; identical to SEQ ID NO: 1152
  REGION 1..107: note = source = /note="Description of Artificial Sequence: Synthetic polypeptide"

SEQ ID NO: 1273 - DNA, 1458 bp, synthetic construct
  misc_feature 1..1458: note = source = /note="Description of Artificial Sequence: Synthetic polynucleotide"
  source 1..1458: mol_type = other DNA
atggccctccctgtcaccgccctgctgcttccgctggctcttctgctccacgccgctcggcccgaagtgcagctcgtcgagagcggagggggactggtgcagcccggaggaagcctgaggctgtcctgcgctgcctccggctacaccttcacctcctactggatgaactgggtcagacaggcacctggaaagggactggtctgggtgtcgcgcattgacccctacgactccgaaacccattacaatcagaaattcaaggaccgcttcaccatctccgtggacaaagccaagagcaccgcgtacctccaaatgaactccctgcgcgctgaggatacagcagtgtactattgcgcccggggaaactgggatgattactggggccagggaactactgtgactgtgtcatccgggggtggcggtagcggaggagggggctccggcggcggcggctcagggggcggaggaagcgacgtcgtgatgacccagtcaccggcattcctgtccgtgactcccggagaaaaggtcacgattacttgccgggcgtccaagagcatctccaaggacctcgcctggtaccaacagaagccggaccaggcccctaagctgttgatctactcggggtccacccttcaatcgggagtgccatcgcggtttagcggttcgggttctgggaccgacttcactttcaccatctcctcactggaagccgaggatgccgccacttactactgtcagcagcacaacaagtatccgtacaccttcggaggcggtaccaaagtggagatcaagaccactaccccagcaccgaggccacccaccccggctcctaccatcgcctcccagcctctgtccctgcgtccggaggcatgtagacccgcagctggtggggccgtgcatacccggggtcttgacttcgcctgcgatatctacatttgggcccctctggctggtacttgcggggtcctgctgctttcactcgtgatcactctttactgtaagcgcggtcggaagaagctgctgtacatctttaagcaacccttcatgaggcctgtgcagactactcaagaggaggacggctgttcatgccggttcccagaggaggaggaaggcggctgcgaactgcgcgtgaaattcagccgcagcgcagatgctccagcctacaagcaggggcagaaccagctctacaacgaactcaatcttggtcggagagaggagtacgacgtgctggacaagcggagaggacgggacccagaaatgggcgggaagccgcgcagaaagaatccccaagagggcctgtacaacgagctccaaaaggataagatggcagaagcctatagcgagattggtatgaaaggggaacgcagaagaggcaaaggccacgacggactgtaccagggactcagcaccgccaccaaggacacctatgacgctcttcacatgcaggccctgccgcctcgg

SEQ ID NO: 1274 - protein, 486 aa, synthetic construct
  REGION 1..486: note = source = /note="Description of Artificial Sequence: Synthetic polypeptide"
MALPVTALLLPLALLLHAARPEVQLVESGGGLVQPGGSLRLSCAASGYTFTSYWMNWVRQAPGKGLVWVSRIDPYDSETHYNQKFKDRFTISVDKAKSTAYLQMNSLRAEDTAVYYCARGNWDDYWGQGTTVTVSSGGGGSGGGGSGGGGSGGGGSDVVMTQSPAFLSVTPGEKVTITCRASKSISKDLAWYQQKPDQAPKLLIYSGSTLQSGVPSRFSGSGSGTDFTFTISSLEAEDAATYYCQQHNKYPYTFGGGTKVEIKTTTPAPRPPTPAPTIASQPLSLRPEACRPAAGGAVHTRGLDFACDIYIWAPLAGTCGVLLLSLVITLYCKRGRKKLLYIFKQPFMRPVQTTQEEDGCSCRFPEEEEGGCELRVKFSRSADAPAYKQGQNQLYNELNLGRREEYDVLDKRRGRDPEMGGKPRRKNPQEGLYNELQKDKMAEAYSEIGMKGERRRGKGHDGLYQGLSTATKDTYDALHMQALPPR

SEQ ID NO: 1275 - protein, 263 aa, synthetic construct
  REGION 1..263: note = source = /note="Description of Artificial Sequence: Synthetic polypeptide"
MALPVTALLLPLALLLHAARPEVQLVESGGGLVQPGGSLRLSCAASGYTFTSYWMNWVRQAPGKGLVWVSRIDPYDSETHYNQKFKDRFTISVDKAKSTAYLQMNSLRAEDTAVYYCARGNWDDYWGQGTTVTVSSGGGGSGGGGSGGGGSGGGGSDVVMTQSPAFLSVTPGEKVTITCRASKSISKDLAWYQQKPDQAPKLLIYSGSTLQSGVPSRFSGSGSGTDFTFTISSLEAEDAATYYCQQHNKYPYTFGGGTKVEIK

SEQ ID NO: 1276 - protein, 115 aa, synthetic construct; identical to SEQ ID NO: 1266
  REGION 1..115: note = source = /note="Description of Artificial Sequence: Synthetic polypeptide"

SEQ ID NO: 1277 - protein, 107 aa, synthetic construct; identical to SEQ ID NO: 1157
  REGION 1..107: note = source = /note="Description of Artificial Sequence: Synthetic polypeptide"

SEQ ID NO: 1278 - DNA, 1458 bp, synthetic construct
  misc_feature 1..1458: note = source = /note="Description of Artificial Sequence: Synthetic polynucleotide"
  source 1..1458: mol_type = other DNA
atggccctccctgtcaccgccctgctgcttccgctggctcttctgctccacgccgctcggcccgaagtgcagctcgtcgagagcggagggggactggtgcagcccggaggaagcctgaggctgtcctgcgctgcctccggctacaccttcacctcctactggatgaactgggtcagacaggcacctggaaagggactggtctgggtgtcgcgcattgacccctacgactccgaaacccattacaatcagaaattcaaggaccgcttcaccatctccgtggacaaagccaagagcaccgcgtacctccaaatgaactccctgcgcgctgaggatacagcagtgtactattgcgcccggggaaactgggatgattactggggccagggaactactgtgactgtgtcatccgggggtggcggtagcggaggagggggctccggcggcggcggctcagggggcggaggaagcgacgtggtcatgactcagtccccggactcactcgcggtgtcgcttggagagagagcgaccatcaactgtcgggcctcaaagagcatcagcaaggacctggcctggtaccagcagaagccgggacagccgccaaagctgctgatctactccgggtccaccttgcaatctggtgtccctgaccggttctccggttccgggtcgggtaccgacttcacgctcactatttcgtcgctgcaagccgaagatgtggccgtgtactattgccaacagcacaacaagtacccctacacttttggcggaggcaccaaggtggaaatcaagaccactaccccagcaccgaggccacccaccccggctcctaccatcgcctcccagcctctgtccctgcgtccggaggcatgtagacccgcagctggtggggccgtgcatacccggggtcttgacttcgcctgcgatatctacatttgggcccctctggctggtacttgcggggtcctgctgctttcactcgtgatcactctttactgtaagcgcggtcggaagaagctgctgtacatctttaagcaacccttcatgaggcctgtgcagactactcaagaggaggacggctgttcatgccggttcccagaggaggaggaaggcggctgcgaactgcgcgtgaaattcagccgcagcgcagatgctccagcctacaagcaggggcagaaccagctctacaacgaactcaatcttggtcggagagaggagtacgacgtgctggacaagcggagaggacgggacccagaaatgggcgggaagccgcgcagaaagaatccccaagagggcctgtacaacgagctccaaaaggataagatggcagaagcctatagcgagattggtatgaaaggggaacgcagaagaggcaaaggccacgacggactgtaccagggactcagcaccgccaccaaggacacctatgacgctcttcacatgcaggccctgccgcctcgg

SEQ ID NO: 1279 - protein, 486 aa, synthetic construct
  REGION 1..486: note = source = /note="Description of Artificial Sequence: Synthetic polypeptide"
MALPVTALLLPLALLLHAARPEVQLVESGGGLVQPGGSLRLSCAASGYTFTSYWMNWVRQAPGKGLVWVSRIDPYDSETHYNQKFKDRFTISVDKAKSTAYLQMNSLRAEDTAVYYCARGNWDDYWGQGTTVTVSSGGGGSGGGGSGGGGSGGGGSDVVMTQSPDSLAVSLGERATINCRASKSISKDLAWYQQKPGQPPKLLIYSGSTLQSGVPDRFSGSGSGTDFTLTISSLQAEDVAVYYCQQHNKYPYTFGGGTKVEIKTTTPAPRPPTPAPTIASQPLSLRPEACRPAAGGAVHTRGLDFACDIYIWAPLAGTCGVLLLSLVITLYCKRGRKKLLYIFKQPFMRPVQTTQEEDGCSCRFPEEEEGGCELRVKFSRSADAPAYKQGQNQLYNELNLGRREEYDVLDKRRGRDPEMGGKPRRKNPQEGLYNELQKDKMAEAYSEIGMKGERRRGKGHDGLYQGLSTATKDTYDALHMQALPPR

SEQ ID NO: 1280 - protein, 263 aa, synthetic construct
  REGION 1..263: note = source = /note="Description of Artificial Sequence: Synthetic polypeptide"
MALPVTALLLPLALLLHAARPEVQLVESGGGLVQPGGSLRLSCAASGYTFTSYWMNWVRQAPGKGLVWVSRIDPYDSETHYNQKFKDRFTISVDKAKSTAYLQMNSLRAEDTAVYYCARGNWDDYWGQGTTVTVSSGGGGSGGGGSGGGGSGGGGSDVVMTQSPDSLAVSLGERATINCRASKSISKDLAWYQQKPGQPPKLLIYSGSTLQSGVPDRFSGSGSGTDFTLTISSLQAEDVAVYYCQQHNKYPYTFGGGTKVEIK

SEQ ID NO: 1281 - protein, 115 aa, synthetic construct; identical to SEQ ID NO: 1266
  REGION 1..115: note = source = /note="Description of Artificial Sequence: Synthetic polypeptide"

SEQ ID NO: 1282 - protein, 107 aa, synthetic construct; identical to SEQ ID NO: 1162
  REGION 1..107: note = source = /note="Description of Artificial Sequence: Synthetic polypeptide"

SEQ ID NO: 1283 - DNA, 1458 bp, synthetic construct
  misc_feature 1..1458: note = source = /note="Description of Artificial Sequence: Synthetic polynucleotide"
  source 1..1458: mol_type = other DNA
atggccctccctgtcaccgccctgctgcttccgctggctcttctgctccacgccgctcggcccgacgtgcagctcacccagtcgccctcatttctgtcggcctcagtgggagacagagtgaccattacttgtcgggcctccaagagcatctccaaggacctggcctggtatcagcagaagccaggaaaggcgcctaagttgctcatctactcggggtcgaccctgcaatctggcgtgccgtcccggttctccggttcgggaagcggtaccgaattcacccttactatctcctccctgcaaccggaggacttcgccacctactactgccaacagcacaacaagtacccgtacactttcgggggtggcacgaaggtcgaaatcaaggggggtggcggtagcggaggagggggctccggcggcggcggctcagggggcggaggaagcgaagtgcagctcgtcgagagcggagggggactggtgcagcccggaggaagcctgaggctgtcctgcgctgcctccggctacaccttcacctcctactggatgaactgggtcagacaggcacctggaaagggactggtctgggtgtcgcgcattgacccctacgactccgaaacccattacaatcagaaattcaaggaccgcttcaccatctccgtggacaaagccaagagcaccgcgtacctccaaatgaactccctgcgcgctgaggatacagcagtgtactattgcgcccggggaaactgggatgattactggggccagggaactactgtgactgtgtcatccaccactaccccagcaccgaggccacccaccccggctcctaccatcgcctcccagcctctgtccctgcgtccggaggcatgtagacccgcagctggtggggccgtgcatacccggggtcttgacttcgcctgcgatatctacatttgggcccctctggctggtacttgcggggtcctgctgctttcactcgtgatcactctttactgtaagcgcggtcggaagaagctgctgtacatctttaagcaacccttcatgaggcctgtgcagactactcaagaggaggacggctgttcatgccggttcccagaggaggaggaaggcggctgcgaactgcgcgtgaaattcagccgcagcgcagatgctccagcctacaagcaggggcagaaccagctctacaacgaactcaatcttggtcggagagaggagtacgacgtgctggacaagcggagaggacgggacccagaaatgggcgggaagccgcgcagaaagaatccccaagagggcctgtacaacgagctccaaaaggataagatggcagaagcctatagcgagattggtatgaaaggggaacgcagaagaggcaaaggccacgacggactgtaccagggactcagcaccgccaccaaggacacctatgacgctcttcacatgcaggccctgccgcctcgg

SEQ ID NO: 1284 - protein, 486 aa, synthetic construct
  REGION 1..486: note = source = /note="Description of Artificial Sequence: Synthetic polypeptide"
MALPVTALLLPLALLLHAARPDVQLTQSPSFLSASVGDRVTITCRASKSISKDLAWYQQKPGKAPKLLIYSGSTLQSGVPSRFSGSGSGTEFTLTISSLQPEDFATYYCQQHNKYPYTFGGGTKVEIKGGGGSGGGGSGGGGSGGGGSEVQLVESGGGLVQPGGSLRLSCAASGYTFTSYWMNWVRQAPGKGLVWVSRIDPYDSETHYNQKFKDRFTISVDKAKSTAYLQMNSLRAEDTAVYYCARGNWDDYWGQGTTVTVSSTTTPAPRPPTPAPTIASQPLSLRPEACRPAAGGAVHTRGLDFACDIYIWAPLAGTCGVLLLSLVITLYCKRGRKKLLYIFKQPFMRPVQTTQEEDGCSCRFPEEEEGGCELRVKFSRSADAPAYKQGQNQLYNELNLGRREEYDVLDKRRGRDPEMGGKPRRKNPQEGLYNELQKDKMAEAYSEIGMKGERRRGKGHDGLYQGLSTATKDTYDALHMQALPPR

SEQ ID NO: 1285 - protein, 263 aa, synthetic construct
  REGION 1..263: note = source = /note="Description of Artificial Sequence: Synthetic polypeptide"
MALPVTALLLPLALLLHAARPDVQLTQSPSFLSASVGDRVTITCRASKSISKDLAWYQQKPGKAPKLLIYSGSTLQSGVPSRFSGSGSGTEFTLTISSLQPEDFATYYCQQHNKYPYTFGGGTKVEIKGGGGSGGGGSGGGGSGGGGSEVQLVESGGGLVQPGGSLRLSCAASGYTFTSYWMNWVRQAPGKGLVWVSRIDPYDSETHYNQKFKDRFTISVDKAKSTAYLQMNSLRAEDTAVYYCARGNWDDYWGQGTTVTVSS

SEQ ID NO: 1286 - protein, 115 aa, synthetic construct; identical to SEQ ID NO: 1266
  REGION 1..115: note = source = /note="Description of Artificial Sequence: Synthetic polypeptide"

SEQ ID NO: 1287 - protein, 107 aa, synthetic construct; identical to SEQ ID NO: 1147
  REGION 1..107: note = source = /note="Description of Artificial Sequence: Synthetic polypeptide"

SEQ ID NO: 1288 - DNA, 1458 bp, synthetic construct
  misc_feature 1..1458: note = source = /note="Description of Artificial Sequence: Synthetic polynucleotide"
  source 1..1458: mol_type = other DNA
atggccctccctgtcaccgccctgctgcttccgctggctcttctgctccacgccgctcggcccgaagtggtgctgacccagtcgcccgcaaccctctctctgtcgccgggagaacgcgccactctttcctgtcgggcgtccaagagcatctcaaaggacctcgcctggtaccagcagaagcctggtcaagccccgcggctgctgatctactccggctccacgctgcaatcaggaatcccagccagattttccggttcggggtcggggactgacttcaccttgaccattagctcgctggaacctgaggacttcgccgtgtattactgccagcagcacaacaagtacccgtacaccttcggaggcggtactaaggtcgagatcaaggggggtggcggtagcggaggagggggctccggcggcggcggctcagggggcggaggaagcgaagtgcagctcgtcgagagcggagggggactggtgcagcccggaggaagcctgaggctgtcctgcgctgcctccggctacaccttcacctcctactggatgaactgggtcagacaggcacctggaaagggactggtctgggtgtcgcgcattgacccctacgactccgaaacccattacaatcagaaattcaaggaccgcttcaccatctccgtggacaaagccaagagcaccgcgtacctccaaatgaactccctgcgcgctgaggatacagcagtgtactattgcgcccggggaaactgggatgattactggggccagggaactactgtgactgtgtcatccaccactaccccagcaccgaggccacccaccccggctcctaccatcgcctcccagcctctgtccctgcgtccggaggcatgtagacccgcagctggtggggccgtgcatacccggggtcttgacttcgcctgcgatatctacatttgggcccctctggctggtacttgcggggtcctgctgctttcactcgtgatcactctttactgtaagcgcggtcggaagaagctgctgtacatctttaagcaacccttcatgaggcctgtgcagactactcaagaggaggacggctgttcatgccggttcccagaggaggaggaaggcggctgcgaactgcgcgtgaaattcagccgcagcgcagatgctccagcctacaagcaggggcagaaccagctctacaacgaactcaatcttggtcggagagaggagtacgacgtgctggacaagcggagaggacgggacccagaaatgggcgggaagccgcgcagaaagaatccccaagagggcctgtacaacgagctccaaaaggataagatggcagaagcctatagcgagattggtatgaaaggggaacgcagaagaggcaaaggccacgacggactgtaccagggactcagcaccgccaccaaggacacctatgacgctcttcacatgcaggccctgccgcctcgg

SEQ ID NO: 1289 - protein, 486 aa, synthetic construct
  REGION 1..486: note = source = /note="Description of Artificial Sequence: Synthetic polypeptide"
MALPVTALLLPLALLLHAARPEVVLTQSPATLSLSPGERATLSCRASKSISKDLAWYQQKPGQAPRLLIYSGSTLQSGIPARFSGSGSGTDFTLTISSLEPEDFAVYYCQQHNKYPYTFGGGTKVEIKGGGGSGGGGSGGGGSGGGGSEVQLVESGGGLVQPGGSLRLSCAASGYTFTSYWMNWVRQAPGKGLVWVSRIDPYDSETHYNQKFKDRFTISVDKAKSTAYLQMNSLRAEDTAVYYCARGNWDDYWGQGTTVTVSSTTTPAPRPPTPAPTIASQPLSLRPEACRPAAGGAVHTRGLDFACDIYIWAPLAGTCGVLLLSLVITLYCKRGRKKLLYIFKQPFMRPVQTTQEEDGCSCRFPEEEEGGCELRVKFSRSADAPAYKQGQNQLYNELNLGRREEYDVLDKRRGRDPEMGGKPRRKNPQEGLYNELQKDKMAEAYSEIGMKGERRRGKGHDGLYQGLSTATKDTYDALHMQALPPR

SEQ ID NO: 1290 - protein, 263 aa, synthetic construct
  REGION 1..263: note = source = /note="Description of Artificial Sequence: Synthetic polypeptide"
MALPVTALLLPLALLLHAARPEVVLTQSPATLSLSPGERATLSCRASKSISKDLAWYQQKPGQAPRLLIYSGSTLQSGIPARFSGSGSGTDFTLTISSLEPEDFAVYYCQQHNKYPYTFGGGTKVEIKGGGGSGGGGSGGGGSGGGGSEVQLVESGGGLVQPGGSLRLSCAASGYTFTSYWMNWVRQAPGKGLVWVSRIDPYDSETHYNQKFKDRFTISVDKAKSTAYLQMNSLRAEDTAVYYCARGNWDDYWGQGTTVTVSS

SEQ ID NO: 1291 - protein, 115 aa, synthetic construct; identical to SEQ ID NO: 1266
  REGION 1..115: note = source = /note="Description of Artificial Sequence: Synthetic polypeptide"

SEQ ID NO: 1292 - protein, 107 aa, synthetic construct; identical to SEQ ID NO: 1152
  REGION 1..107: note = source = /note="Description of Artificial Sequence: Synthetic polypeptide"

SEQ ID NO: 1293 - DNA, 1458 bp, synthetic construct
  misc_feature 1..1458: note = source = /note="Description of Artificial Sequence: Synthetic polynucleotide"
  source 1..1458: mol_type = other DNA
atggccctccctgtcaccgccctgctgcttccgctggctcttctgctccacgccgctcggcccgacgtcgtgatgacccagtcaccggcattcctgtccgtgactcccggagaaaaggtcacgattacttgccgggcgtccaagagcatctccaaggacctcgcctggtaccaacagaagccggaccaggcccctaagctgttgatctactcggggtccacccttcaatcgggagtgccatcgcggtttagcggttcgggttctgggaccgacttcactttcaccatctcctcactggaagccgaggatgccgccacttactactgtcagcagcacaacaagtatccgtacaccttcggaggcggtaccaaagtggagatcaaggggggtggcggtagcggaggagggggctccggcggcggcggctcagggggcggaggaagcgaagtgcagctcgtcgagagcggagggggactggtgcagcccggaggaagcctgaggctgtcctgcgctgcctccggctacaccttcacctcctactggatgaactgggtcagacaggcacctggaaagggactggtctgggtgtcgcgcattgacccctacgactccgaaacccattacaatcagaaattcaaggaccgcttcaccatctccgtggacaaagccaagagcaccgcgtacctccaaatgaactccctgcgcgctgaggatacagcagtgtactattgcgcccggggaaactgggatgattactggggccagggaactactgtgactgtgtcatccaccactaccccagcaccgaggccacccaccccggctcctaccatcgcctcccagcctctgtccctgcgtccggaggcatgtagacccgcagctggtggggccgtgcatacccggggtcttgacttcgcctgcgatatctacatttgggcccctctggctggtacttgcggggtcctgctgctttcactcgtgatcactctttactgtaagcgcggtcggaagaagctgctgtacatctttaagcaacccttcatgaggcctgtgcagactactcaagaggaggacggctgttcatgccggttcccagaggaggaggaaggcggctgcgaactgcgcgtgaaattcagccgcagcgcagatgctccagcctacaagcaggggcagaaccagctctacaacgaactcaatcttggtcggagagaggagtacgacgtgctggacaagcggagaggacgggacccagaaatgggcgggaagccgcgcagaaagaatccccaagagggcctgtacaacgagctccaaaaggataagatggcagaagcctatagcgagattggtatgaaaggggaacgcagaagaggcaaaggccacgacggactgtaccagggactcagcaccgccaccaaggacacctatgacgctcttcacatgcaggccctgccgcctcgg

SEQ ID NO: 1294 - protein, 486 aa, synthetic construct
  REGION 1..486: note = source = /note="Description of Artificial Sequence: Synthetic polypeptide"
MALPVTALLLPLALLLHAARPDVVMTQSPAFLSVTPGEKVTITCRASKSISKDLAWYQQKPDQAPKLLIYSGSTLQSGVPSRFSGSGSGTDFTFTISSLEAEDAATYYCQQHNKYPYTFGGGTKVEIKGGGGSGGGGSGGGGSGGGGSEVQLVESGGGLVQPGGSLRLSCAASGYTFTSYWMNWVRQAPGKGLVWVSRIDPYDSETHYNQKFKDRFTISVDKAKSTAYLQMNSLRAEDTAVYYCARGNWDDYWGQGTTVTVSSTTTPAPRPPTPAPTIASQPLSLRPEACRPAAGGAVHTRGLDFACDIYIWAPLAGTCGVLLLSLVITLYCKRGRKKLLYIFKQPFMRPVQTTQEEDGCSCRFPEEEEGGCELRVKFSRSADAPAYKQGQNQLYNELNLGRREEYDVLDKRRGRDPEMGGKPRRKNPQEGLYNELQKDKMAEAYSEIGMKGERRRGKGHDGLYQGLSTATKDTYDALHMQALPPR

SEQ ID NO: 1295 - protein, 263 aa, synthetic construct
  REGION 1..263: note = source = /note="Description of Artificial Sequence: Synthetic polypeptide"
MALPVTALLLPLALLLHAARPDVVMTQSPAFLSVTPGEKVTITCRASKSISKDLAWYQQKPDQAPKLLIYSGSTLQSGVPSRFSGSGSGTDFTFTISSLEAEDAATYYCQQHNKYPYTFGGGTKVEIKGGGGSGGGGSGGGGSGGGGSEVQLVESGGGLVQPGGSLRLSCAASGYTFTSYWMNWVRQAPGKGLVWVSRIDPYDSETHYNQKFKDRFTISVDKAKSTAYLQMNSLRAEDTAVYYCARGNWDDYWGQGTTVTVSS

SEQ ID NO: 1296 - protein, 115 aa, synthetic construct; identical to SEQ ID NO: 1266
  REGION 1..115: note = source = /note="Description of Artificial Sequence: Synthetic polypeptide"

SEQ ID NO: 1297 - protein, 107 aa, synthetic construct; identical to SEQ ID NO: 1157
  REGION 1..107: note = source = /note="Description of Artificial Sequence: Synthetic polypeptide"

SEQ ID NO: 1298 - DNA, 1458 bp, synthetic construct
  misc_feature 1..1458: note = source = /note="Description of Artificial Sequence: Synthetic polynucleotide"
  source 1..1458: mol_type = other DNA
atggccctccctgtcaccgccctgctgcttccgctggctcttctgctccacgccgctcggcccgacgtggtcatgactcagtccccggactcactcgcggtgtcgcttggagagagagcgaccatcaactgtcgggcctcaaagagcatcagcaaggacctggcctggtaccagcagaagccgggacagccgccaaagctgctgatctactccgggtccaccttgcaatctggtgtccctgaccggttctccggttccgggtcgggtaccgacttcacgctcactatttcgtcgctgcaagccgaagatgtggccgtgtactattgccaacagcacaacaagtacccctacacttttggcggaggcaccaaggtggaaatcaaggggggtggcggtagcggaggagggggctccggcggcggcggctcagggggcggaggaagcgaagtgcagctcgtcgagagcggagggggactggtgcagcccggaggaagcctgaggctgtcctgcgctgcctccggctacaccttcacctcctactggatgaactgggtcagacaggcacctggaaagggactggtctgggtgtcgcgcattgacccctacgactccgaaacccattacaatcagaaattcaaggaccgcttcaccatctccgtggacaaagccaagagcaccgcgtacctccaaatgaactccctgcgcgctgaggatacagcagtgtactattgcgcccggggaaactgggatgattactggggccagggaactactgtgactgtgtcatccaccactaccccagcaccgaggccacccaccccggctcctaccatcgcctcccagcctctgtccctgcgtccggaggcatgtagacccgcagctggtggggccgtgcatacccggggtcttgacttcgcctgcgatatctacatttgggcccctctggctggtacttgcggggtcctgctgctttcactcgtgatcactctttactgtaagcgcggtcggaagaagctgctgtacatctttaagcaacccttcatgaggcctgtgcagactactcaagaggaggacggctgttcatgccggttcccagaggaggaggaaggcggctgcgaactgcgcgtgaaattcagccgcagcgcagatgctccagcctacaagcaggggcagaaccagctctacaacgaactcaatcttggtcggagagaggagtacgacgtgctggacaagcggagaggacgggacccagaaatgggcgggaagccgcgcagaaagaatccccaagagggcctgtacaacgagctccaaaaggataagatggcagaagcctatagcgagattggtatgaaaggggaacgcagaagaggcaaaggccacgacggactgtaccagggactcagcaccgccaccaaggacacctatgacgctcttcacatgcaggccctgccgcctcgg

SEQ ID NO: 1299 - protein, 486 aa, synthetic construct
  REGION 1..486: note = source = /note="Description of Artificial Sequence: Synthetic polypeptide"
MALPVTALLLPLALLLHAARPDVVMTQSPDSLAVSLGERATINCRASKSISKDLAWYQQKPGQPPKLLIYSGSTLQSGVPDRFSGSGSGTDFTLTISSLQAEDVAVYYCQQHNKYPYTFGGGTKVEIKGGGGSGGGGSGGGGSGGGGSEVQLVESGGGLVQPGGSLRLSCAASGYTFTSYWMNWVRQAPGKGLVWVSRIDPYDSETHYNQKFKDRFTISVDKAKSTAYLQMNSLRAEDTAVYYCARGNWDDYWGQGTTVTVSSTTTPAPRPPTPAPTIASQPLSLRPEACRPAAGGAVHTRGLDFACDIYIWAPLAGTCGVLLLSLVITLYCKRGRKKLLYIFKQPFMRPVQTTQEEDGCSCRFPEEEEGGCELRVKFSRSADAPAYKQGQNQLYNELNLGRREEYDVLDKRRGRDPEMGGKPRRKNPQEGLYNELQKDKMAEAYSEIGMKGERRRGKGHDGLYQGLSTATKDTYDALHMQALPPR

SEQ ID NO: 1300 - protein, 263 aa, synthetic construct
  REGION 1..263: note = source = /note="Description of Artificial Sequence: Synthetic polypeptide"
MALPVTALLLPLALLLHAARPDVVMTQSPDSLAVSLGERATINCRASKSISKDLAWYQQKPGQPPKLLIYSGSTLQSGVPDRFSGSGSGTDFTLTISSLQAEDVAVYYCQQHNKYPYTFGGGTKVEIKGGGGSGGGGSGGGGSGGGGSEVQLVESGGGLVQPGGSLRLSCAASGYTFTSYWMNWVRQAPGKGLVWVSRIDPYDSETHYNQKFKDRFTISVDKAKSTAYLQMNSLRAEDTAVYYCARGNWDDYWGQGTTVTVSS

SEQ ID NO: 1301 - protein, 115 aa, synthetic construct; identical to SEQ ID NO: 1266
  REGION 1..115: note = source = /note="Description of Artificial Sequence: Synthetic polypeptide"

SEQ ID NO: 1302 - protein, 107 aa, synthetic construct; identical to SEQ ID NO: 1162
  REGION 1..107: note = source = /note="Description of Artificial Sequence: Synthetic polypeptide"

SEQ ID NO: 1303 - protein, 514 aa, synthetic construct
  REGION 1..514: note = source = /note="Description of Artificial Sequence: Synthetic polypeptide"
EVQLQQSGPGLVKPSQTLSLTCAISGDSVSSNSAAWNWIRQSPSRGLEWLGRTYYRSKWYNDYAVSVKSRITINPDTSKNQFSLQLNSVTPEDTAVYYCARDLGWIAVAGTFDYWGQGTLVTVSSGGGGSGGGGSGGGGSQSALTQPASVSGSPGQSITISCTGTSSDVGGYNYVSWYQQHPGKAPKLMIYDVSKRPSGVSNRFSGSKSGNTASLTISGLQAEDEADYYCSSYTSSSLNHVFGTGTKVTVLTGGGGSGGGGSGGGGSGGGGSEIVMTQSPATLSLSPGERATLSCRASQDISKYLNWYQQKPGQAPRLLIYHTSRLHSGIPARFSGSGSGTDYTLTISSLQPEDFAVYFCQQGNTLPYTFGQGTKLEIKGGGGSGGGGSGGGGSQVQLQESGPGLVKPSETLSLTCTVSGVSLPDYGVSWIRQPPGKGLEWIGVIWGSETTYYQSSLKSRVTISKDNSKNQVSLKLSSVTAADTAVYYCAKHYYYGGSYAMDYWGQGTLVTVSS

SEQ ID NO: 1304 - protein, 737 aa, synthetic construct
  REGION 1..737: note = source = /note="Description of Artificial Sequence: Synthetic polypeptide"
EVQLQQSGPGLVKPSQTLSLTCAISGDSVSSNSAAWNWIRQSPSRGLEWLGRTYYRSKWYNDYAVSVKSRITINPDTSKNQFSLQLNSVTPEDTAVYYCARDLGWIAVAGTFDYWGQGTLVTVSSGGGGSGGGGSGGGGSQSALTQPASVSGSPGQSITISCTGTSSDVGGYNYVSWYQQHPGKAPKLMIYDVSKRPSGVSNRFSGSKSGNTASLTISGLQAEDEADYYCSSYTSSSLNHVFGTGTKVTVLTGGGGSGGGGSGGGGSGGGGSEIVMTQSPATLSLSPGERATLSCRASQDISKYLNWYQQKPGQAPRLLIYHTSRLHSGIPARFSGSGSGTDYTLTISSLQPEDFAVYFCQQGNTLPYTFGQGTKLEIKGGGGSGGGGSGGGGSQVQLQESGPGLVKPSETLSLTCTVSGVSLPDYGVSWIRQPPGKGLEWIGVIWGSETTYYQSSLKSRVTISKDNSKNQVSLKLSSVTAADTAVYYCAKHYYYGGSYAMDYWGQGTLVTVSSTTTPAPRPPTPAPTIASQPLSLRPEACRPAAGGAVHTRGLDFACDIYIWAPLAGTCGVLLLSLVITLYCKRGRKKLLYIFKQPFMRPVQTTQEEDGCSCRFPEEEEGGCELRVKFSRSADAPAYKQGQNQLYNELNLGRREEYDVLDKRRGRDPEMGGKPRRKNPQEGLYNELQKDKMAEAYSEIGMKGERRRGKGHDGLYQGLSTATKDTYDALHMQALPPR

SEQ ID NO: 1305 - DNA, 1542 bp, synthetic construct
  misc_feature 1..1542: note = source = /note="Description of Artificial Sequence: Synthetic polynucleotide"
  source 1..1542: mol_type = other DNA
gaagtgcagctccaacagtcaggaccaggactcgtcaaaccctcccaaaccctcagccttacttgtgccatttccggggattccgtgtcgagcaattccgccgcctggaactggatcaggcagtccccgtcgcgcgggctcgaatggctgggacgcacttactaccggtccaagtggtacaacgactacgccgtcagcgtgaagtcgcggatcaccattaaccccgacacctccaagaaccagttcagcctccaactgaactccgtgacccctgaggataccgcggtctactattgtgcccgggacctgggttggattgccgtggccgggaccttcgattactggggccagggaactctcgtcaccgtgtcctcgggagggggtggctcagggggtggtggatcgggtggtggcggctcccagtccgctctgactcagcccgcgtccgtgtccggttccccgggacagtcgatcacaatcagctgcactggcacctcctccgacgtcggcgggtacaactacgtgtcgtggtaccaacagcaccctggaaaagccccgaagctgatgatctacgacgtgtccaagaggccaagcggagtgtcaaatcgcttttccggctcgaagtcgggaaacaccgccagcctgactatctcgggactgcaggccgaggacgaggccgactactactgctcgtcttacacctcctcatccttgaaccacgtgttcggaaccggaaccaaggtcaccgtgctgactggagggggaggctccggtggcggcggctctggaggaggagggtccggcggaggaggatcggaaatcgtgatgacccagtcccccgcaaccctgtccctgagcccgggcgaaagagctaccctgtcgtgccgggcgtcgcaggacatctccaagtacctgaactggtaccagcagaagcccggccaggcaccgagactgctgatctaccacactagccgcctgcattccggtatccccgcacggttcagcggcagcgggagcggaaccgattacacgctcactatttcctcactgcaacccgaggatttcgctgtgtacttctgccaacaaggaaacaccctgccttataccttcggacagggtacaaagctggagattaagggaggagggggctccggcggcgggggcagcgggggcggcggaagccaggtccagctgcaggaatccggtccgggactcgtgaagccctccgaaactctctcccttacgtgcaccgtgtcaggggtgtccctgccggactacggagtgtcctggattcggcaacctccggggaagggactggagtggatcggagtgatctggggctccgaaactacctactaccagtcatcattgaagtcaagagtgaccatttcgaaggacaacagcaagaaccaggtgtcccttaaactgtccagcgtgaccgcggcggatactgccgtctactactgcgccaagcactattactacggcggaagctatgcgatggactactggggacagggcaccttggtcactgtgtcctcc

SEQ ID NO: 1306 - DNA, 2211 bp, synthetic construct
  misc_feature 1..2211: note = source = /note="Description of Artificial Sequence: Synthetic polynucleotide"
  source 1..2211: mol_type = other DNA
gaagtgcagctccaacagtcaggaccaggactcgtcaaaccctcccaaaccctcagccttacttgtgccatttccggggattccgtgtcgagcaattccgccgcctggaactggatcaggcagtccccgtcgcgcgggctcgaatggctgggacgcacttactaccggtccaagtggtacaacgactacgccgtcagcgtgaagtcgcggatcaccattaaccccgacacctccaagaaccagttcagcctccaactgaactccgtgacccctgaggataccgcggtctactattgtgcccgggacctgggttggattgccgtggccgggaccttcgattactggggccagggaactctcgtcaccgtgtcctcgggagggggtggctcagggggtggtggatcgggtggtggcggctcccagtccgctctgactcagcccgcgtccgtgtccggttccccgggacagtcgatcacaatcagctgcactggcacctcctccgacgtcggcgggtacaactacgtgtcgtggtaccaacagcaccctggaaaagccccgaagctgatgatctacgacgtgtccaagaggccaagcggagtgtcaaatcgcttttccggctcgaagtcgggaaacaccgccagcctgactatctcgggactgcaggccgaggacgaggccgactactactgctcgtcttacacctcctcatccttgaaccacgtgttcggaaccggaaccaaggtcaccgtgctgactggagggggaggctccggtggcggcggctctggaggaggagggtccggcggaggaggatcggaaatcgtgatgacccagtcccccgcaaccctgtccctgagcccgggcgaaagagctaccctgtcgtgccgggcgtcgcaggacatctccaagtacctgaactggtaccagcagaagcccggccaggcaccgagactgctgatctaccacactagccgcctgcattccggtatccccgcacggttcagcggcagcgggagcggaaccgattacacgctcactatttcctcactgcaacccgaggatttcgctgtgtacttctgccaacaaggaaacaccctgccttataccttcggacagggtacaaagctggagattaagggaggagggggctccggcggcgggggcagcgggggcggcggaagccaggtccagctgcaggaatccggtccgggactcgtgaagccctccgaaactctctcccttacgtgcaccgtgtcaggggtgtccctgccggactacggagtgtcctggattcggcaacctccggggaagggactggagtggatcggagtgatctggggctccgaaactacctactaccagtcatcattgaagtcaagagtgaccatttcgaaggacaacagcaagaaccaggtgtcccttaaactgtccagcgtgaccgcggcggatactgccgtctactactgcgccaagcactattactacggcggaagctatgcgatggactactggggacagggcaccttggtcactgtgtcctccaccactaccccagcaccgaggccacccaccccggctcctaccatcgcctcccagcctctgtccctgcgtccggaggcatgtagacccgcagctggtggggccgtgcatacccggggtcttgacttcgcctgcgatatctacatttgggcccctctggctggtacttgcggggtcctgctgctttcactcgtgatcactctttactgtaagcgcggtcggaagaagctgctgtacatctttaagcaacccttcatgaggcctgtgcagactactcaagaggaggacggctgttcatgccggttcccagaggaggaggaaggcggctgcgaactgcgcgtgaaattcagccgcagcgcagatgctccagcctacaagcaggggcagaaccagctctacaacgaactcaatcttggtcggagagaggagtacgacgtgctggacaagcggagaggacgggacccagaaatgggcgggaagccgcgcagaaagaatccccaagagggcctgtacaacgagctccaaaaggataagatggcagaagcctatagcgagattggtatgaaaggggaacgcagaagaggcaaaggccacgacggactgtaccagggactcagcaccgccaccaaggacacctatgacgctcttcacatgcaggccctgccgcctcgg

SEQ ID NO: 1307 - protein, 514 aa, synthetic construct
  REGION 1..514: note = source = /note="Description of Artificial Sequence: Synthetic polypeptide"
EIVMTQSPATLSLSPGERATLSCRASQDISKYLNWYQQKPGQAPRLLIYHTSRLHSGIPARFSGSGSGTDYTLTISSLQPEDFAVYFCQQGNTLPYTFGQGTKLEIKGGGGSGGGGSGGGGSQVQLQESGPGLVKPSETLSLTCTVSGVSLPDYGVSWIRQPPGKGLEWIGVIWGSETTYYQSSLKSRVTISKDNSKNQVSLKLSSVTAADTAVYYCAKHYYYGGSYAMDYWGQGTLVTVSSGGGGSGGGGSGGGGSGGGGSEVQLQQSGPGLVKPSQTLSLTCAISGDSVSSNSAAWNWIRQSPSRGLEWLGRTYYRSKWYNDYAVSVKSRITINPDTSKNQFSLQLNSVTPEDTAVYYCARDLGWIAVAGTFDYWGQGTLVTVSSGGGGSGGGGSGGGGSQSALTQPASVSGSPGQSITISCTGTSSDVGGYNYVSWYQQHPGKAPKLMIYDVSKRPSGVSNRFSGSKSGNTASLTISGLQAEDEADYYCSSYTSSSLNHVFGTGTKVTVLT

SEQ ID NO: 1308 - protein, 737 aa, synthetic construct
  REGION 1..737: note = source = /note="Description of Artificial Sequence: Synthetic polypeptide"
EIVMTQSPATLSLSPGERATLSCRASQDISKYLNWYQQKPGQAPRLLIYHTSRLHSGIPARFSGSGSGTDYTLTISSLQPEDFAVYFCQQGNTLPYTFGQGTKLEIKGGGGSGGGGSGGGGSQVQLQESGPGLVKPSETLSLTCTVSGVSLPDYGVSWIRQPPGKGLEWIGVIWGSETTYYQSSLKSRVTISKDNSKNQVSLKLSSVTAADTAVYYCAKHYYYGGSYAMDYWGQGTLVTVSSGGGGSGGGGSGGGGSGGGGSEVQLQQSGPGLVKPSQTLSLTCAISGDSVSSNSAAWNWIRQSPSRGLEWLGRTYYRSKWYNDYAVSVKSRITINPDTSKNQFSLQLNSVTPEDTAVYYCARDLGWIAVAGTFDYWGQGTLVTVSSGGGGSGGGGSGGGGSQSALTQPASVSGSPGQSITISCTGTSSDVGGYNYVSWYQQHPGKAPKLMIYDVSKRPSGVSNRFSGSKSGNTASLTISGLQAEDEADYYCSSYTSSSLNHVFGTGTKVTVLTTTTPAPRPPTPAPTIASQPLSLRPEACRPAAGGAVHTRGLDFACDIYIWAPLAGTCGVLLLSLVITLYCKRGRKKLLYIFKQPFMRPVQTTQEEDGCSCRFPEEEEGGCELRVKFSRSADAPAYKQGQNQLYNELNLGRREEYDVLDKRRGRDPEMGGKPRRKNPQEGLYNELQKDKMAEAYSEIGMKGERRRGKGHDGLYQGLSTATKDTYDALHMQALPPR

SEQ ID NO: 1309 - DNA, 1542 bp, synthetic construct
  misc_feature 1..1542: note = source = /note="Description of Artificial Sequence: Synthetic polynucleotide"
  source 1..1542: mol_type = other DNA
gaaatcgtgatgacccagtcccccgcaaccctgtccctgagcccgggcgaaagagctaccctgtcgtgccgggcgtcgcaggacatctccaagtacctgaactggtaccagcagaagcccggccaggcaccgagactgctgatctaccacactagccgcctgcattccggtatccccgcacggttcagcggcagcgggagcggaaccgattacacgctcactatttcctcactgcaacccgaggatttcgctgtgtacttctgccaacaaggaaacaccctgccttataccttcggacagggtacaaagctggagattaagggaggagggggctccggcggcgggggcagcgggggcggcggaagccaggtccagctgcaggaatccggtccgggactcgtgaagccctccgaaactctctcccttacgtgcaccgtgtcaggggtgtccctgccggactacggagtgtcctggattcggcaacctccggggaagggactggagtggatcggagtgatctggggctccgaaactacctactaccagtcatcattgaagtcaagagtgaccatttcgaaggacaacagcaagaaccaggtgtcccttaaactgtccagcgtgaccgcggcggatactgccgtctactactgcgccaagcactattactacggcggaagctatgcgatggactactggggacagggcaccttggtcactgtgtcctccggagggggaggctccggtggcggcggctctggaggaggagggtccggcggaggaggatcggaagtgcagctccaacagtcaggaccaggactcgtcaaaccctcccaaaccctcagccttacttgtgccatttccggggattccgtgtcgagcaattccgccgcctggaactggatcaggcagtccccgtcgcgcgggctcgaatggctgggacgcacttactaccggtccaagtggtacaacgactacgccgtcagcgtgaagtcgcggatcaccattaaccccgacacctccaagaaccagttcagcctccaactgaactccgtgacccctgaggataccgcggtctactattgtgcccgggacctgggttggattgccgtggccgggaccttcgattactggggccagggaactctcgtcaccgtgtcctcgggagggggtggctcagggggtggtggatcgggtggtggcggctcccagtccgctctgactcagcccgcgtccgtgtccggttccccgggacagtcgatcacaatcagctgcactggcacctcctccgacgtcggcgggtacaactacgtgtcgtggtaccaacagcaccctggaaaagccccgaagctgatgatctacgacgtgtccaagaggccaagcggagtgtcaaatcgcttttccggctcgaagtcgggaaacaccgccagcctgactatctcgggactgcaggccgaggacgaggccgactactactgctcgtcttacacctcctcatccttgaaccacgtgttcggaaccggaaccaaggtcaccgtgctgact

SEQ ID NO: 1310 - DNA, 2211 bp, synthetic construct
  misc_feature 1..2211: note = source = /note="Description of Artificial Sequence: Synthetic polynucleotide"
  source 1..2211: mol_type = other DNA
gaaatcgtgatgacccagtcccccgcaaccctgtccctgagcccgggcgaaagagctaccctgtcgtgccgggcgtcgcaggacatctccaagtacctgaactggtaccagcagaagcccggccaggcaccgagactgctgatctaccacactagccgcctgcattccggtatccccgcacggttcagcggcagcgggagcggaaccgattacacgctcactatttcctcactgcaacccgaggatttcgctgtgtacttctgccaacaaggaaacaccctgccttataccttcggacagggtacaaagctggagattaagggaggagggggctccggcggcgggggcagcgggggcggcggaagccaggtccagctgcaggaatccggtccgggactcgtgaagccctccgaaactctctcccttacgtgcaccgtgtcaggggtgtccctgccggactacggagtgtcctggattcggcaacctccggggaagggactggagtggatcggagtgatctggggctccgaaactacctactaccagtcatcattgaagtcaagagtgaccatttcgaaggacaacagcaagaaccaggtgtcccttaaactgtccagcgtgaccgcggcggatactgccgtctactactgcgccaagcactattactacggcggaagctatgcgatggactactggggacagggcaccttggtcactgtgtcctccggagggggaggctccggtggcggcggctctggaggaggagggtccggcggaggaggatcggaagtgcagctccaacagtcaggaccaggactcgtcaaaccctcccaaaccctcagccttacttgtgccatttccggggattccgtgtcgagcaattccgccgcctggaactggatcaggcagtccccgtcgcgcgggctcgaatggctgggacgcacttactaccggtccaagtggtacaacgactacgccgtcagcgtgaagtcgcggatcaccattaaccccgacacctccaagaaccagttcagcctccaactgaactccgtgacccctgaggataccgcggtctactattgtgcccgggacctgggttggattgccgtggccgggaccttcgattactggggccagggaactctcgtcaccgtgtcctcgggagggggtggctcagggggtggtggatcgggtggtggcggctcccagtccgctctgactcagcccgcgtccgtgtccggttccccgggacagtcgatcacaatcagctgcactggcacctcctccgacgtcggcgggtacaactacgtgtcgtggtaccaacagcaccctggaaaagccccgaagctgatgatctacgacgtgtccaagaggccaagcggagtgtcaaatcgcttttccggctcgaagtcgggaaacaccgccagcctgactatctcgggactgcaggccgaggacgaggccgactactactgctcgtcttacacctcctcatccttgaaccacgtgttcggaaccggaaccaaggtcaccgtgctgactaccactaccccagcaccgaggccacccaccccggctcctaccatcgcctcccagcctctgtccctgcgtccggaggcatgtagacccgcagctggtggggccgtgcatacccggggtcttgacttcgcctgcgatatctacatttgggcccctctggctggtacttgcggggtcctgctgctttcactcgtgatcactctttactgtaagcgcggtcggaagaagctgctgtacatctttaagcaacccttcatgaggcctgtgcagactactcaagaggaggacggctgttcatgccggttcccagaggaggaggaaggcggctgcgaactgcgcgtgaaattcagccgcagcgcagatgctccagcctacaagcaggggcagaaccagctctacaacgaactcaatcttggtcggagagaggagtacgacgtgctggacaagcggagaggacgggacccagaaatgggcgggaagccgcgcagaaagaatccccaagagggcctgtacaacgagctccaaaaggataagatggcagaagcctatagcgagattggtatgaaaggggaacgcagaagaggcaaaggccacgacggactgtaccagggactcagcaccgccaccaaggacacctatgacgctcttcacatgcaggccctgccgcctcgg

SEQ ID NO: 1311 - protein, 20 aa, synthetic construct
  REGION 1..20: note = source = /note="Description of Artificial Sequence: Synthetic peptide"
GGGGSGGGGSGGGGSGGGGS

SEQ ID NO: 1312-1314 - skipped (3 entries)

SEQ ID NO: 1315 - DNA, 120 bp, synthetic construct
  misc_feature 1..120: note = source = /note="Description of Artificial Sequence: Synthetic polynucleotide"
  source 1..120: mol_type = other DNA
agcttggatccaagaggaaaatttgtttcatacagaaggcgttaagaggaaaatttgtttcatacagaaggcgttaagaggaaaatttgtttcatacagaaggcgttcaagcttgtcgac

SEQ ID NO: 1316 - protein, 4 aa, synthetic construct
  REGION 1..4: note = source = /note="Description of Artificial Sequence: Synthetic peptide"
RGDS

SEQ ID NO: 1317 - protein, 41 aa, synthetic construct
  REGION 1..41: note = source = /note="Description of Artificial Sequence: Synthetic polypeptide"
RSKRSRLLHSDYMNMTPRRPGPTRKHYQPYAPPRDFAAYRS

SEQ ID NO: 1318 - DNA, 123 bp, synthetic construct; identical to SEQ ID NO: 52
  misc_feature 1..123: note = source = /note="Description of Artificial Sequence: Synthetic polynucleotide"
  source 1..123: mol_type = other DNA

SEQ ID NO: 1319 - protein, 35 aa, synthetic construct
  REGION 1..35: note = source = /note="Description of Artificial Sequence: Synthetic polypeptide"
TKKKYSSSVHDPNGEYMFMRAVNTAKKSRLTDVTL

SEQ ID NO: 1320 - DNA, 105 bp, synthetic construct
  misc_feature 1..105: note = source = /note="Description of Artificial Sequence: Synthetic polynucleotide"
  source 1..105: mol_type = other DNA
acaaaaaagaagtattcatccagtgtgcacgaccctaacggtgaatacatgttcatgagagcagtgaacacagccaaaaaatccagactcacagatgtgacccta

SEQ ID NO: 1321 - protein, 35 aa, synthetic construct
  REGION 1..35: note = source = /note="Description of Artificial Sequence: Synthetic polypeptide"
TKKKYSSSVHDPNGEFMFMRAVNTAKKSRLTDVTL

SEQ ID NO: 1322 - protein, 18 aa, synthetic construct
  REGION 1..18: note = source = /note="Description of Artificial Sequence: Synthetic peptide"
GSTSGSGKPGSGEGSTKG

SEQ ID NO: 1323 - DNA, 521 bp, synthetic construct
  misc_feature 1..521: note = source = /note="Description of Artificial Sequence: Synthetic polynucleotide"
  source 1..521: mol_type = other DNA
acccctctctccagccactaagccagttgctccctcggctgacggctgcacgcgaggcctccgaacgtcttacgccttgtggcgcgcccgtccttgtcccgggtgtgatggcggggtgtggggcggagggcgtggcggggaagggccggcgacgagagccgcgcgggacgactcgtcggcgataaccggtgtcgggtagcgccagccgcgcgacggtaacgagggaccgcgacaggcagacgctcccatgatcactctgcacgccgaaggcaaatagtgcaggccgtgcggcgcttggcgttccttggaagggctgaatccccgcctcgtccttcgcagcggccccccgggtgttcccatcgccgcttctaggcccactgcgacgcttgcctgcacttcttacacgctctgggtcccagccgcggcgacgcaaagggccttggtgcgggtctcgtcggcgcagggacgcgtttgggtcccgacggaaccttttccgcgttggggttggggcaccataagct

SEQ ID NO: 1324 - DNA, 118 bp, synthetic construct
  misc_feature 1..118: note = source = /note="Description of Artificial Sequence: Synthetic polynucleotide"
  source 1..118: mol_type = other DNA
acccctctctccagccactaagccagttgctccctcggctgacggctgcacgcgaggcctccgaacgtcttacgccttgtggcgcgcccgtccttgtcccgggtgtgatggcggggtg

SEQ ID NO: 1325 - DNA, 221 bp, synthetic construct
  misc_feature 1..221: note = source = /note="Description of Artificial Sequence: Synthetic polynucleotide"
  source 1..221: mol_type = other DNA
acccctctctccagccactaagccagttgctccctcggctgacggctgcacgcgaggcctccgaacgtcttacgccttgtggcgcgcccgtccttgtcccgggtgtgatggcggggtgtggggcggagggcgtggcggggaagggccggcgacgagagccgcgcgggacgactcgtcggcgataaccggtgtcgggtagcgccagccgcgcgacggtaacg

SEQ ID NO: 1326 - DNA, 324 bp, synthetic construct
  misc_feature 1..324: note = source = /note="Description of Artificial Sequence: Synthetic polynucleotide"
  source 1..324: mol_type = other DNA
acccctctctccagccactaagccagttgctccctcggctgacggctgcacgcgaggcctccgaacgtcttacgccttgtggcgcgcccgtccttgtcccgggtgtgatggcggggtgtggggcggagggcgtggcggggaagggccggcgacgagagccgcgcgggacgactcgtcggcgataaccggtgtcgggtagcgccagccgcgcgacggtaacgagggaccgcgacaggcagacgctcccatgatcactctgcacgccgaaggcaaatagtgcaggccgtgcggcgcttggcgttccttggaagggctgaatccccg

SEQ ID NO: 1327 - DNA, 422 bp, synthetic construct
  misc_feature 1..422: note = source = /note="Description of Artificial Sequence: Synthetic polynucleotide"
  source 1..422: mol_type = other DNA
acccctctctccagccactaagccagttgctccctcggctgacggctgcacgcgaggcctccgaacgtcttacgccttgtggcgcgcccgtccttgtcccgggtgtgatggcggggtgtggggcggagggcgtggcggggaagggccggcgacgagagccgcgcgggacgactcgtcggcgataaccggtgtcgggtagcgccagccgcgcgacggtaacgagggaccgcgacaggcagacgctcccatgatcactctgcacgccgaaggcaaatagtgcaggccgtgcggcgcttggcgttccttggaagggctgaatccccgcctcgtccttcgcagcggccccccgggtgttcccatcgccgcttctaggcccactgcgacgcttgcctgcacttcttacacgctctgggtcccagccg

SEQ ID NO: 1328 - protein, 21 aa, synthetic construct
  VARIANT 1..3: note = /replace=" "
  REGION 1..21: note = misc_feature - /note="Variant residues given in the sequence have no preference with respect to those in the annotations for variant positions"
  REGION 1..21: note = source = /note="Description of Artificial Sequence: Synthetic peptide"
GSGEGRGSLLTCGDVEENPGP

SEQ ID NO: 1329 - protein, 22 aa, synthetic construct
  VARIANT 1..3: note = /replace=" "
  REGION 1..22: note = misc_feature - /note="Variant residues given in the sequence have no preference with respect to those in the annotations for variant positions"
  REGION 1..22: note = source = /note="Description of Artificial Sequence: Synthetic peptide"
GSGATNFSLLKQAGDVEENPGP

SEQ ID NO: 1330 - protein, 23 aa, synthetic construct
  VARIANT 1..3: note = /replace=" "
  REGION 1..23: note = misc_feature - /note="Variant residues given in the sequence have no preference with respect to those in the annotations for variant positions"
  REGION 1..23: note = source = /note="Description of Artificial Sequence: Synthetic peptide"
GSGQCTNYALLKLAGDVESNPGP

SEQ ID NO: 1331 - protein, 25 aa, synthetic construct
  VARIANT 1..3: note = /replace=" "
  REGION 1..25: note = misc_feature - /note="Variant residues given in the sequence have no preference with respect to those in the annotations for variant positions"
  REGION 1..25: note = source = /note="Description of Artificial Sequence: Synthetic peptide"
GSGVKQTLNFDLLKLAGDVESNPGP

SEQ ID NO: 1332 - protein, 1132 aa, Homo sapiens [sequence omitted]

SEQ ID NO: 1333 - DNA, 4027 bp, Homo sapiens
  source 1..4027: mol_type = genomic DNA
caggcagcgtggtcctgctgcgcacgtgggaagccctggccccggccacccccgcgatgccgcgcgctccccgctgccgagccgtgcgctccctgctgcgcagccactaccgcgaggtgctgccgctggccacgttcgtgcggcgcctggggccccagggctggcggctggtgcagcgcggggacccggcggctttccgcgcgctggtggcccagtgcctggtgtgcgtgccctgggacgcacggccgccccccgccgccccctccttccgccaggtgtcctgcctgaaggagctggtggcccgagtgctgcagaggctgtgcgagcgcggcgcgaagaacgtgctggccttcggcttcgcgctgctggacggggcccgcgggggcccccccgaggccttcaccaccagcgtgcgcagctacctgcccaacacggtgaccgacgcactgcgggggagcggggcgtgggggctgctgttgcgccgcgtgggcgacgacgtgctggttcacctgctggcacgctgcgcgctctttgtgctggtggctcccagctgcgcctaccaggtgtgcgggccgccgctgtaccagctcggcgctgccactcaggcccggcccccgccacacgctagtggaccccgaaggcgtctgggatgcgaacgggcctggaaccatagcgtcagggaggccggggtccccctgggcctgccagccccgggtgcgaggaggcgcgggggcagtgccagccgaagtctgccgttgcccaagaggcccaggcgtggcgctgcccctgagccggagcggacgcccgttgggcaggggtcctgggcccacccgggcaggacgcgtggaccgagtgaccgtggtttctgtgtggtgtcacctgccagacccgccgaagaagccacctctttggagggtgcgctctctggcacgcgccactcccacccatccgtgggccgccagcaccacgcgggccccccatccacatcgcggccaccacgtccctgggacacgccttgtcccccggtgtacgccgagaccaagcacttcctctactcctcaggcgacaaggagcagctgcggccctccttcctactcagctctctgaggcccagcctgactggcgctcggaggctcgtggagaccatctttctgggttccaggccctggatgccagggactccccgcaggttgccccgcctgccccagcgctactggcaaatgcggcccctgtttctggagctgcttgggaaccacgcgcagtgcccctacggggtgctcctcaagacgcactgcccgctgcgagctgcggtcaccccagcagccggtgtctgtgcccgggagaagccccagggctctgtggcggcccccgaggaggaggacacagacccccgtcgcctggtgcagctgctccgccagcacagcagcccctggcaggtgtacggcttcgtgcgggcctgcctgcgccggctggtgcccccaggcctctggggctccaggcacaacgaacgccgcttcctcaggaacaccaagaagttcatctccctggggaagcatgccaagctctcgctgcaggagctgacgtggaagatgagcgtgcggggctgcgcttggctgcgcaggagcccaggggttggctgtgttccggccgcagagcaccgtctgcgtgaggagatcctggccaagttcctgcactggctgatgagtgtgtacgtcgtcgagctgctcaggtctttcttttatgtcacggagaccacgtttcaaaagaacaggctctttttctaccggaagagtgtctggagcaagttgcaaagcattggaatcagacagcacttgaagagggtgcagctgcgggagctgtcggaagcagaggtcaggcagcatcgggaagccaggcccgccctgctgacgtccagactccgcttcatccccaagcctgacgggctgcggccgattgtgaacatggactacgtcgtgggagccagaacgttccgcagagaaaagagggccgagcgtctcacctcgagggtgaaggcactgttcagcgtgctcaactacgagcgggcgcggcgccccggcctcctgggcgcctctgtgctgggcctggacgatatccacagggcctggcgcaccttcgtgctgcgtgtgcgggcccaggacccgccgcctgagctgtactttgtcaaggtggatgtgacgggcgcgtacgacaccatcccccaggacaggctcacggaggtcatcgccagcatcatcaaaccccagaacacgtactgcgtgcgtcggtatgccgtggtccagaaggccgcccatgggcacgtccgcaaggccttcaagagccacgtctctaccttgacagacctccagccgtacatgcgacagttcgtggctcacctgcaggagaccagcccgctgagggatgccgtcgtcatcgagcagagctcctccctgaatgaggccagcagtggcctcttcgacgtcttcctacgcttcatgtgccaccacgccgtgcgcatcaggggcaagtcctacgtccagtgccaggggatcccgcagggctccatcctctccacgctgctctgcagcctgtgctacggcgacatggagaacaagctgtttgcggggattcggcgggacgggctgctcctgcgtttggtggatgatttcttgttggtgacacctcacctcacccacgcgaaaaccttcctcaggaccctggtccgaggtgtccctgagtatggctgcgtggtgaacttgcggaagacagtggtgaacttccctgtagaagacgaggccctgggtggcacggcttttgttcagatgccggcccacggcctattcccctggtgcggcctgctgctggatacccggaccctggaggtgcagagcgactactccagctatgcccggacctccatcagagccagtctcaccttcaaccgcggcttcaaggctgggaggaacatgcgtcgcaaactctttggggtcttgcggctgaagtgtcacagcctgtttctggatttgcaggtgaacagcctccagacggtgtgcaccaacatctacaagatcctcctgctgcaggcgtacaggtttcacgcatgtgtgctgcagctcccatttcatcagcaagtttggaagaaccccacatttttcctgcgcgtcatctctgacacggcctccctctgctactccatcctgaaagccaagaacgcagggatgtcgctgggggccaagggcgccgccggccctctgccctccgaggccgtgcagtggctgtgccaccaagcattcctgctcaagctgactcgacaccgtgtcacctacgtgccactcctggggtcactcaggacagcccagacgcagctgagtcggaagctcccggggacgacgctgactgccctggaggccgcagccaacccggcactgccctcagacttcaagaccatcctggactgatggccacccgcccacagccaggccgagagcagacaccagcagccctgtcacgccgggctctacgtcccagggagggaggggcggcccacacccaggcccgcaccgctgggagtctgaggcctgagtgagtgtttggccgaggcctgcatgtccggctgaaggctgagtgtccggctgaggcctgagcgagtgtccagccaagggctgagtgtccagcacacctgccgtcttcacttccccacaggctggcgctcggctccaccccagggccagcttttcctcaccaggagcccggcttccactccccacataggaatagtccatccccagattcgccattgttcacccctcgccctgccctcctttgccttccacccccaccatccaggtggagaccctgagaaggaccctgggagctctgggaatttggagtgaccaaaggtgtgccctgtacacaggcgaggaccctgcacctggatgggggtccctgtgggtcaaattggggggaggtgctgtgggagtaaaatactgaatatatgagtttttcagttttgaaaaaaaaaaaaaaaaaa

SEQ ID NO: 1334 - protein, 14 aa, synthetic construct
  MOD_RES 3..5: note = Any amino acid
  MOD_RES 7: note = Any amino acid
  MOD_RES 9..12: note = Any amino acid
  REGION 1..14: note = source = /note="Description of Artificial Sequence: Synthetic peptide"
TGXXXDXGXXXXVS

SEQ ID NO: 1335 - protein, 7 aa, synthetic construct
  MOD_RES 1: note = Any amino acid
  MOD_RES 3: note = Any amino acid
  REGION 1..7: note = source = /note="Description of Artificial Sequence: Synthetic peptide"
XVXNRPS

SEQ ID NO: 1336 - skipped

SEQ ID NO: 1337 - protein, 7 aa, synthetic construct
  REGION 1..7: note = source = /note="Description of Artificial Sequence: Synthetic peptide"
NNNAAWN

SEQ ID NO: 1338 - protein, 7 aa, synthetic construct
  REGION 1..7: note = source = /note="Description of Artificial Sequence: Synthetic peptide"
SNSAAWN

SEQ ID NO: 1339 - protein, 7 aa, synthetic construct
  REGION 1..7: note = source = /note="Description of Artificial Sequence: Synthetic peptide"
SNSDTWN

SEQ ID NO: 1340 - protein, 7 aa, synthetic construct
  REGION 1..7: note = source = /note="Description of Artificial Sequence: Synthetic peptide"
SNSDTWN

SEQ ID NO: 1341 - protein, 7 aa, synthetic construct
  REGION 1..7: note = source = /note="Description of Artificial Sequence: Synthetic peptide"
SNSDTWN

SEQ ID NO: 1342 - protein, 7 aa, synthetic construct
  REGION 1..7: note = source = /note="Description of Artificial Sequence: Synthetic peptide"
SNSDTWN

SEQ ID NO: 1343 - protein, 7 aa, synthetic construct
  REGION 1..7: note = source = /note="Description of Artificial Sequence: Synthetic peptide"
SNSDTWN

SEQ ID NO: 1344 - protein, 7 aa, synthetic construct
  REGION 1..7: note = source = /note="Description of Artificial Sequence: Synthetic peptide"
SNSDTWN

SEQ ID NO: 1345 - protein, 7 aa, synthetic construct
  REGION 1..7: note = source = /note="Description of Artificial Sequence: Synthetic peptide"
SNSDTWN

SEQ ID NO: 1346 - protein, 18 aa, synthetic construct
  REGION 1..18: note = source = /note="Description of Artificial Sequence: Synthetic peptide"
RTYHRSTWYNDYVGSVKS

SEQ ID NO: 1347 - protein, 18 aa, synthetic construct
  REGION 1..18: note = source = /note="Description of Artificial Sequence: Synthetic peptide"
RTFYRSKWYNDYAVSVKG

SEQ ID NO: 1348 - protein, 18 aa, synthetic construct
  REGION 1..18: note = source = /note="Description of Artificial Sequence: Synthetic peptide"
RTYHRSTWYDDYASSVRG

SEQ ID NO: 1349 - protein, 18 aa, synthetic construct
  REGION 1..18: note = source = /note="Description of Artificial Sequence: Synthetic peptide"
RTYHRSTWYDDYASSVRG

SEQ ID NO: 1350 - protein, 18 aa, synthetic construct
  REGION 1..18: note = source = /note="Description of Artificial Sequence: Synthetic peptide"
RTYHRSTWYDDYASSVRG

SEQ ID NO: 1351 - protein, 18 aa, synthetic construct
  REGION 1..18: note = source = /note="Description of Artificial Sequence: Synthetic peptide"
RTYHRSTWYDDYASSVRG

SEQ ID NO: 1352 - protein, 18 aa, synthetic construct
  REGION 1..18: note = source = /note="Description of Artificial Sequence: Synthetic peptide"
RTYHRSTWYDDYASSVRG

SEQ ID NO: 1353 - protein, 18 aa, synthetic construct
  REGION 1..18: note = source = /note="Description of Artificial Sequence: Synthetic peptide"
RTYHRSTWYDDYASSVRG

SEQ ID NO: 1354 - protein, 18 aa, synthetic construct
  REGION 1..18: note = source = /note="Description of Artificial Sequence: Synthetic peptide"
RTYHRSTWYDDYASSVRG

SEQ ID NO: 1355 - protein, 12 aa, synthetic construct
  REGION 1..12: note = source = /note="Description of Artificial Sequence: Synthetic peptide"
ETDYGDYGAFDI

SEQ ID NO: 1356 - protein, 9 aa, synthetic construct
  REGION 1..9: note = source = /note="Description of Artificial Sequence: Synthetic peptide"
GDYYYGLDV

SEQ ID NO: 1357 - protein, 15 aa, synthetic construct
  REGION 1..15: note = source = /note="Description of Artificial Sequence: Synthetic peptide"
DRLQDGNSWSDAFDV

SEQ ID NO: 1358 - protein, 15 aa, synthetic construct
  REGION 1..15: note = source = /note="Description of Artificial Sequence: Synthetic peptide"
DRLQDGNSWSDAFDV

SEQ ID NO: 1359 - protein, 15 aa, synthetic construct
  REGION 1..15: note = source = /note="Description of Artificial Sequence: Synthetic peptide"
DRLQDGNSWSDAFDV

SEQ ID NO: 1360 - protein, 15 aa, synthetic construct
  REGION 1..15: note = source = /note="Description of Artificial Sequence: Synthetic peptide"
DRLQDGNSWSDAFDV

SEQ ID NO: 1361 - protein, 15 aa, synthetic construct
  REGION 1..15: note = source = /note="Description of Artificial Sequence: Synthetic peptide"
DRLQDGNSWSDAFDV

SEQ ID NO: 1362 - protein, 15 aa, synthetic construct
  REGION 1..15: note = source = /note="Description of Artificial Sequence: Synthetic peptide"
VRLQDGNSWSDAFDV

SEQ ID NO: 1363 - protein, 15 aa, synthetic construct
  REGION 1..15: note = source = /note="Description of Artificial Sequence: Synthetic peptide"
VRLQDGNSWSDAFDV

SEQ ID NO: 1364 - protein, 7 aa, synthetic construct
  REGION 1..7: note = source = /note="Description of Artificial Sequence: Synthetic peptide"
SNSAAWN

SEQ ID NO: 1365 - protein, 5 aa, synthetic construct
  REGION 1..5: note = source = /note="Description of Artificial Sequence: Synthetic peptide"
SNYMS

SEQ ID NO: 1366 - protein, 7 aa, synthetic construct
  REGION 1..7: note = source = /note="Description of Artificial Sequence: Synthetic peptide"
SNSAAWN

SEQ ID NO: 1367 - protein, 7 aa, synthetic construct
  REGION 1..7: note = source = /note="Description of Artificial Sequence: Synthetic peptide"
SNSDTWN

SEQ ID NO: 1368 - protein, 5 aa, synthetic construct
  REGION 1..5: note = source = /note="Description of Artificial Sequence: Synthetic peptide"
DYAMH

SEQ ID NO: 1369 - protein, 5 aa, synthetic construct
  REGION 1..5: note = source = /note="Description of Artificial Sequence: Synthetic peptide"
DYAMH

SEQ ID NO: 1370 - protein, 7 aa, synthetic construct
  REGION 1..7: note = source = /note="Description of Artificial Sequence: Synthetic peptide"
SNSATWT

SEQ ID NO: 1371 - protein, 5 aa, synthetic construct
  REGION 1..5: note = source = /note="Description of Artificial Sequence: Synthetic peptide"
GYYMH

SEQ ID NO: 1372 - protein, 5 aa, synthetic construct
  REGION 1..5: note = source = /note="Description of Artificial Sequence: Synthetic peptide"
SYGIS

SEQ ID NO: 1373 - protein, 5 aa, synthetic construct
  REGION 1..5: note = source = /note="Description of Artificial Sequence: Synthetic peptide"
NAWMN

SEQ ID NO: 1374 - protein, 7 aa, synthetic construct
  REGION 1..7: note = source = /note="Description of Artificial Sequence: Synthetic peptide"
SNSDTWN

SEQ ID NO: 1375 - protein, 7 aa, synthetic construct
  REGION 1..7: note = source = /note="Description of Artificial Sequence: Synthetic peptide"
SNSAAWN

SEQ ID NO: 1376 - protein, 7 aa, synthetic construct
  REGION 1..7: note = source = /note="Description of Artificial Sequence: Synthetic peptide"
SNSDTWN

SEQ ID NO: 1377 - protein, 7 aa, synthetic construct
  REGION 1..7: note = source = /note="Description of Artificial Sequence: Synthetic peptide"
SSSYYWG

SEQ ID NO: 1378 - protein, 5 aa, synthetic construct
  REGION 1..5: note = source = /note="Description of Artificial Sequence: Synthetic peptide"
SYYMH

SEQ ID NO: 1379 - protein, 5 aa, synthetic construct
  REGION 1..5: note = source = /note="Description of Artificial Sequence: Synthetic peptide"
SYAMH

SEQ ID NO: 1380 - protein, 5 aa, synthetic construct
  REGION 1..5: note = source = /note="Description of Artificial Sequence: Synthetic peptide"
SYYMH

SEQ ID NO: 1381 - protein, 5 aa, synthetic construct
  REGION 1..5: note = source = /note="Description of Artificial Sequence: Synthetic peptide"
SYAMS

SEQ ID NO: 1382 - protein, 5 aa, synthetic construct
  REGION 1..5: note = source = /note="Description of Artificial Sequence: Synthetic peptide"
SYYMH

SEQ ID NO: 1383 - protein, 5 aa, synthetic construct
  REGION 1..5: note = source = /note="Description of Artificial Sequence: Synthetic peptide"
SYYMH

SEQ ID NO: 1384 - protein, 5 aa, synthetic construct
  REGION 1..5: note = source = /note="Description of Artificial Sequence: Synthetic peptide"
SYYMH

SEQ ID NO: 1385 - protein, 5 aa, synthetic construct
  REGION 1..5: note = source = /note="Description of Artificial Sequence: Synthetic peptide"
SYYMH

SEQ ID NO: 1386 - protein, 5 aa, synthetic construct
  REGION 1..5: note = source = /note="Description of Artificial Sequence: Synthetic peptide"
SYAIS

SEQ ID NO: 1387 - protein, 5 aa, synthetic construct
  REGION 1..5: note = source = /note="Description of Artificial Sequence: Synthetic peptide"
SYYMH

SEQ ID NO: 1388 - protein, 5 aa, synthetic construct
  REGION 1..5: note = source = /note="Description of Artificial Sequence: Synthetic peptide"
SYAMS

SEQ ID NO: 1389 - protein, 5 aa, synthetic construct
  REGION 1..5: note = source = /note="Description of Artificial Sequence: Synthetic peptide"
SYYMH

SEQ ID NO: 1390 - protein, 5 aa, synthetic construct
  REGION 1..5: note = source = /note="Description of Artificial Sequence: Synthetic peptide"
GSWIG

SEQ ID NO: 1391 - protein, 5 aa, synthetic construct
  REGION 1..5: note = source = /note="Description of Artificial Sequence: Synthetic peptide"
SYYWS

SEQ ID NO: 1392 - protein, 5 aa, synthetic construct
  REGION 1..5: note = source = /note="Description of Artificial Sequence: Synthetic peptide"
DYYMS

SEQ ID NO: 1393 - protein, 5 aa, synthetic construct
  REGION 1..5: note = source = /note="Description of Artificial Sequence: Synthetic peptide"
SYYMH

SEQ ID NO: 1394 - protein, 5 aa, synthetic construct
  REGION 1..5: note = source = /note="Description of Artificial Sequence: Synthetic peptide"
GYYMH

SEQ ID NO: 1395 - protein, 5 aa, synthetic construct
  REGION 1..5: note = source = /note="Description of Artificial Sequence: Synthetic peptide"
SYDIN

SEQ ID NO: 1396 - protein, 5 aa, synthetic construct
  REGION 1..5: note = source = /note="Description of Artificial Sequence: Synthetic peptide"
SYGIS

SEQ ID NO: 1397 - protein, 7 aa, synthetic construct
  REGION 1..7: note = source = /note="Description of Artificial Sequence: Synthetic peptide"
TFGMSVS

SEQ ID NO: 1398 - protein, 7 aa, synthetic construct
  REGION 1..7: note = source = /note="Description of Artificial Sequence: Synthetic peptide"
TSRHWWN

SEQ ID NO: 1399 - protein, 5 aa, synthetic construct
  REGION 1..5: note = source = /note="Description of Artificial Sequence: Synthetic peptide"
SYYMH

SEQ ID NO: 1400 - protein, 5 aa, synthetic construct
  REGION 1..5: note = source = /note="Description of Artificial Sequence: Synthetic peptide"
SYYMH

SEQ ID NO: 1401 - protein, 5 aa, synthetic construct
  REGION 1..5: note = source = /note="Description of Artificial Sequence: Synthetic peptide"
SYYMH

SEQ ID NO: 1402 - protein, 5 aa, synthetic construct
  REGION 1..5: note = source = /note="Description of Artificial Sequence: Synthetic peptide"
SYYMH

SEQ ID NO: 1403 - protein, 18 aa, synthetic construct
  REGION 1..18: note = source = /note="Description of Artificial Sequence: Synthetic peptide"
RTYYRSKWYNDYAVSVKS

SEQ ID NO: 1404 - protein, 16 aa, synthetic construct
  REGION 1..16: note = source = /note="Description of Artificial Sequence: Synthetic peptide"
VIYSGGSTYYADSVKG

SEQ ID NO: 1405 - protein, 18 aa, synthetic construct
  REGION 1..18: note = source = /note="Description of Artificial Sequence: Synthetic peptide"
RTYYRSKWYNDYAVSVKS

SEQ ID NO: 1406 - protein, 18 aa, synthetic construct
  REGION 1..18: note = source = /note="Description of Artificial Sequence: Synthetic peptide"
RTYHRSTWYDDYASSVRG

SEQ ID NO: 1407 - protein, 17 aa, synthetic construct
  REGION 1..17: note = source = /note="Description of Artificial Sequence: Synthetic peptide"
GISWNSGSIGYADSVKG

SEQ ID NO: 1408 - protein, 17 aa, synthetic construct
  REGION 1..17: note = source = /note="Description of Artificial Sequence: Synthetic peptide"
GISWNSGSIGYADSVKG

SEQ ID NO: 1409 - protein, 18 aa, synthetic construct
  REGION 1..18: note = source = /note="Description of Artificial Sequence: Synthetic peptide"
RTYYRSTWYNDYAVSVKS

SEQ ID NO: 1410 - protein, 17 aa, synthetic construct
  REGION 1..17: note = source = /note="Description of Artificial Sequence: Synthetic peptide"
WINPNSGGTNYAQKFQG

SEQ ID NO: 1411 - protein, 17 aa, synthetic construct
  REGION 1..17: note = source = /note="Description of Artificial Sequence: Synthetic peptide"
WISAYNGNTNYAQKLQG

SEQ ID NO: 1412 - protein, 19 aa, synthetic construct
  REGION 1..19: note = source = /note="Description of Artificial Sequence: Synthetic peptide"
RIKSKTDGGTADYAAPVKG

SEQ ID NO: 1413 - protein, 18 aa, synthetic construct
  REGION 1..18: note = source = /note="Description of Artificial Sequence: Synthetic peptide"
RTYHRSTWYDDYASSVRG

SEQ ID NO: 1414 - protein, 18 aa, synthetic construct
  REGION 1..18: note = source = /note="Description of Artificial Sequence: Synthetic peptide"
RTYYRSKWYNDYAVSVKS

SEQ ID NO: 1415 - protein, 18 aa, synthetic construct
  REGION 1..18: note = source = /note="Description of Artificial Sequence: Synthetic peptide"
RTYHRSTWYDDYASSVRG

SEQ ID NO: 1416 - protein, 16 aa, synthetic construct
  REGION 1..16: note = source = /note="Description of Artificial Sequence: Synthetic peptide"
SIYYSGSTYYNPSLKS

SEQ ID NO: 1417 - protein, 17 aa, synthetic construct
  REGION 1..17: note = source = /note="Description of Artificial Sequence: Synthetic peptide"
IINPSGGSTSYAQKFQG

SEQ ID NO: 1418 - protein, 17 aa, synthetic construct
  REGION 1..17: note = source = /note="Description of Artificial Sequence: Synthetic peptide"
AISSNGGSTYYANSVKD

SEQ ID NO: 1419 - protein, 17 aa, synthetic construct
  REGION 1..17: note = source = /note="Description of Artificial Sequence: Synthetic peptide"
IINPSGGSTSYAQKFQG

SEQ ID NO: 1420 - protein, 17 aa, synthetic construct
  REGION 1..17: note = source = /note="Description of Artificial Sequence: Synthetic peptide"
AISGSGGSTYYADSVKG

SEQ ID NO: 1421 - protein, 17 aa, synthetic construct
  REGION 1..17: note = source = /note="Description of Artificial Sequence: Synthetic peptide"
IINPSGGSTSYAQKFQG

SEQ ID NO: 1422 - protein, 17 aa, synthetic construct
  REGION 1..17: note = source = /note="Description of Artificial Sequence: Synthetic peptide"
IINPSGGSTSYAQKFQG

SEQ ID NO: 1423 - protein, 17 aa, synthetic construct
  REGION 1..17: note = source = /note="Description of Artificial Sequence: Synthetic peptide"
IINPSGGSTSYAQKFQG

SEQ ID NO: 1424 - protein, 17 aa, synthetic construct
  REGION 1..17: note = source = /note="Description of Artificial Sequence: Synthetic peptide"
IINPSGGSTSYAQKFQG

SEQ ID NO: 1425 - protein, 17 aa, synthetic construct
  REGION 1..17: note = source = /note="Description of Artificial Sequence: Synthetic peptide"
GIIPIFGTANYAQKFQG

SEQ ID NO: 1426 - protein, 17 aa, synthetic construct
  REGION 1..17: note = source = /note="Description of Artificial Sequence: Synthetic peptide"
IINPSGGSTSYAQKFQG

SEQ ID NO: 1427 - protein, 17 aa, synthetic construct
  REGION 1..17: note = source = /note="Description of Artificial Sequence: Synthetic peptide"
YISSSSSTIYYADSVKG

SEQ ID NO: 1428 - protein, 17 aa, synthetic construct
  REGION 1..17: note = source = /note="Description of Artificial Sequence: Synthetic peptide"
IINPSGGSTSYAQKFQG

SEQ ID NO: 1429 - protein, 17 aa, synthetic construct
  REGION 1..17: note = source = /note="Description of Artificial Sequence: Synthetic peptide"
IIYPGDSDTRYSPSFQG

SEQ ID NO: 1430 - protein, 16 aa, synthetic construct
  REGION 1..16: note = source = /note="Description of Artificial Sequence: Synthetic peptide"
FTSHSGNVKYNPSLTG

SEQ ID NO: 1431 - protein, 17 aa, synthetic construct
  REGION 1..17: note = source = /note="Description of Artificial Sequence: Synthetic peptide"
YISSSGSTIYYADSVKG

SEQ ID NO: 1432 - protein, 17 aa, synthetic construct
  REGION 1..17: note = source = /note="Description of Artificial Sequence: Synthetic peptide"
IINPSGGSTSYAQKFQG

SEQ ID NO: 1433 - protein, 17 aa, synthetic construct
  REGION 1..17: note = source = /note="Description of Artificial Sequence: Synthetic peptide"
WINPNSGGTNYAQKFQG

SEQ ID NO: 1434 - protein, 17 aa, synthetic construct
  REGION 1..17: note = source = /note="Description of Artificial Sequence: Synthetic peptide"
WMNPNSGNTGYAQKFQG

SEQ ID NO: 1435 - protein, 17 aa, synthetic construct
  REGION 1..17: note = source = /note="Description of Artificial Sequence: Synthetic peptide"
WISAYNGNTNYAQKLQG

SEQ ID NO: 1436 - protein, 16 aa, synthetic construct
  REGION 1..16: note = source = /note="Description of Artificial Sequence: Synthetic peptide"
LIDWDDDKYYSTSLRT

SEQ ID NO: 1437 - protein, 16 aa, synthetic construct
  REGION 1..16: note = source = /note="Description of Artificial Sequence: Synthetic peptide"
QIYHSGTTTYNPSLGS

SEQ ID NO: 1438 - protein, 17 aa, synthetic construct
  REGION 1..17: note = source = /note="Description of Artificial Sequence: Synthetic peptide"
IINPSGGSTSYAQKFQG

SEQ ID NO: 1439 - protein, 17 aa, synthetic construct
  REGION 1..17: note = source = /note="Description of Artificial Sequence: Synthetic peptide"
IINPSGGSTSYAQKFQG

SEQ ID NO: 1440 - protein, 17 aa, synthetic construct
  REGION 1..17: note = source = /note="Description of Artificial Sequence: Synthetic peptide"
IINPSGGSTSYAQKFQG

SEQ ID NO: 1441 - protein, 17 aa, synthetic construct
  REGION 1..17: note = source = /note="Description of Artificial Sequence: Synthetic peptide"
IINPSGGSTSYAQKFQG

SEQ ID NO: 1442 - protein, 12 aa, synthetic construct
  REGION 1..12: note = source = /note="Description of Artificial Sequence: Synthetic peptide"
EVTGDLEDAFDI

SEQ ID NO: 1443 - protein, 18 aa, synthetic construct
  REGION 1..18: note = source = /note="Description of Artificial Sequence: Synthetic peptide"
QSTPYDSSGYYSGDAFDI

SEQ ID NO: 1444 - protein, 13 aa, synthetic construct
  REGION 1..13: note = source = /note="Description of Artificial Sequence: Synthetic peptide"
DLGWIAVAGTFDY

SEQ ID NO: 1445 - protein, 15 aa, synthetic construct
  REGION 1..15: note = source = /note="Description of Artificial Sequence: Synthetic peptide"
DRLQDGNSWSDAFDV

SEQ ID NO: 1446 - protein, 13 aa, synthetic construct
  REGION 1..13: note = source = /note="Description of Artificial Sequence: Synthetic peptide"
GLSSWHFHDALDI

SEQ ID NO: 1447 - protein, 15 aa, synthetic construct
  REGION 1..15: note = source = /note="Description of Artificial Sequence: Synthetic peptide"
DKGGGYYDFWSGSDY

SEQ ID NO: 1448 - protein, 9 aa, synthetic construct
  REGION 1..9: note = source = /note="Description of Artificial Sequence: Synthetic peptide"
EGSGSYYAY

SEQ ID NO: 1449 - protein, 13 aa, synthetic construct
  REGION 1..13: note = source = /note="Description of Artificial Sequence: Synthetic peptide"
DYWGYYGSGTLDY

SEQ ID NO: 1450 - protein, 19 aa, synthetic construct
  REGION 1..19: note = source = /note="Description of Artificial Sequence: Synthetic peptide"
AGLALYSNYVPYYYYGMDV

SEQ ID NO: 1451 - protein, 5 aa, synthetic construct
  REGION 1..5: note = source = /note="Description of Artificial Sequence: Synthetic peptide"
GATDV

SEQ ID NO: 1452 - protein, 15 aa, synthetic construct
  REGION 1..15: note = source = /note="Description of Artificial Sequence: Synthetic peptide"
DRLQDGNSWSDAFDV

SEQ ID NO: 1453 - protein, 15 aa, synthetic construct
  REGION 1..15: note = source = /note="Description of Artificial Sequence: Synthetic peptide"
EESSSGWYEGNWFDP

SEQ ID NO: 1454 - protein, 15 aa, synthetic construct
  REGION 1..15: note = source = /note="Description of Artificial Sequence: Synthetic peptide"
DRLQDGNSWSDAFDV

SEQ ID NO: 1455 - protein, 10 aa, synthetic construct
  REGION 1..10: note = source = /note="Description of Artificial Sequence: Synthetic peptide"
GRMDTAMAQI

SEQ ID NO: 1456 - protein, 8 aa, synthetic construct
  REGION 1..8: note = source = /note="Description of Artificial Sequence: Synthetic peptide"
DLDVSLDI

SEQ ID NO: 1457 - protein, 14 aa, synthetic construct
  REGION 1..14: note = source = /note="Description of Artificial Sequence: Synthetic peptide"
VHSSGYYHPGPNDY

SEQ ID NO: 1458 - protein, 9 aa, synthetic construct
  REGION 1..9: note = source = /note="Description of Artificial Sequence: Synthetic peptide"
EAGVVAVDY

SEQ ID NO: 1459 - protein, 13 aa, synthetic construct
  REGION 1..13: note = source = /note="Description of Artificial Sequence: Synthetic peptide"
EPLFGVVEEDVDY

SEQ ID NO: 1460 - protein, 11 aa, synthetic construct
  REGION 1..11: note = source = /note="Description of Artificial Sequence: Synthetic peptide"
GSGSLGDAFDI

SEQ ID NO: 1461 - protein, 12 aa, synthetic construct
  REGION 1..12: note = source = /note="Description of Artificial Sequence: Synthetic peptide"
DGFGELSGAFDI

SEQ ID NO: 1462 - protein, 13 aa, synthetic construct
  REGION 1..13: note = source = /note="Description of Artificial Sequence: Synthetic peptide"
GPIGCSGGSCLDY

SEQ ID NO: 1463 - protein, 12 aa, synthetic construct
  REGION 1..12: note = source = /note="Description of Artificial Sequence: Synthetic peptide"
GSYGDYGDAFDI

SEQ ID NO: 1464 - protein, 9 aa, synthetic construct
  REGION 1..9: note = source = /note="Description of Artificial Sequence: Synthetic peptide"
DHKVVRFGY

SEQ ID NO: 1465 - protein, 7 aa, synthetic construct
  REGION 1..7: note = source = /note="Description of Artificial Sequence: Synthetic peptide"
GDYYMDV

SEQ ID NO: 1466 - protein, 15 aa, synthetic construct
  REGION 1..15: note = source = /note="Description of Artificial Sequence: Synthetic peptide"
DGPIRYFDHSKAFDI

SEQ ID NO: 1467 - protein, 10 aa, synthetic construct
  REGION 1..10: note = source = /note="Description of Artificial Sequence: Synthetic peptide"
EMDDSSGPDY

SEQ ID NO: 1468 - protein, 14 aa, synthetic construct
  REGION 1..14: note = source = /note="Description of Artificial Sequence: Synthetic peptide"
GFLRGGDCCGALDI

SEQ ID NO: 1469 - protein, 13 aa, synthetic construct
  REGION 1..13: note = source = /note="Description of Artificial Sequence: Synthetic peptide"
GLDPLFAYDAFEI

SEQ ID NO: 1470 - protein, 10 aa, synthetic construct
  REGION 1..10: note = source = /note="Description of Artificial Sequence: Synthetic peptide"
DDFWSGSVDY

SEQ ID NO: 1471 - protein, 13 aa, synthetic construct
  REGION 1..13: note = source = /note="Description of Artificial Sequence: Synthetic peptide"
EDDSSGYTSPFDY

SEQ ID NO: 1472 - protein, 16 aa, synthetic construct
  REGION 1..16: note = source = /note="Description of Artificial Sequence: Synthetic peptide"
EPASSSWYGYYYYMDV

SEQ ID NO: 1473 - protein, 13 aa, synthetic construct
  REGION 1..13: note = source = /note="Description of Artificial Sequence: Synthetic peptide"
GDSNYWSYYGMDV

SEQ ID NO: 1474 - protein, 9 aa, synthetic construct
  REGION 1..9: note = source = /note="Description of Artificial Sequence: Synthetic peptide"
FSSSDSYDY

SEQ ID NO: 1475 - protein, 17 aa, synthetic construct
  REGION 1..17: note = source = /note="Description of Artificial Sequence: Synthetic peptide"
IYGGDRTNTQAPYFFDL

SEQ ID NO: 1476 - protein, 13 aa, synthetic construct
  REGION 1..13: note = source = /note="Description of Artificial Sequence: Synthetic peptide"
DYLELATYYGMDV

SEQ ID NO: 1477 - protein, 15 aa, synthetic construct
  REGION 1..15: note = source = /note="Description of Artificial Sequence: Synthetic peptide"
DLAAAGNYYYYGMDV

SEQ ID NO: 1478 - protein, 13 aa, synthetic construct
  REGION 1..13: note = source = /note="Description of Artificial Sequence: Synthetic peptide"
DDDFWSGSGAFDI

SEQ ID NO: 1479 - protein, 14 aa, synthetic construct
  REGION 1..14: note = source = /note="Description of Artificial Sequence: Synthetic peptide"
PEGVSYYDSSVLDY

SEQ ID NO: 1480 - protein, 12 aa, synthetic construct
  REGION 1..12: note = source = /note="Description of Artificial Sequence: Synthetic peptide"
GGYGDYLDAFDI

SEQ ID NO: 1481 - protein, 5 aa, synthetic construct
  REGION 1..5: note = source = /note="Description of Artificial Sequence: Synthetic peptide"
DYAFH

SEQ ID NO: 1482 - protein, 5 aa, synthetic construct
  REGION 1..5: note = source = /note="Description of Artificial Sequence: Synthetic peptide"
KYGMN

SEQ ID NO: 1483 - protein, 5 aa, synthetic construct
  REGION 1..5: note = source = /note="Description of Artificial Sequence: Synthetic peptide"
DYYMA

SEQ ID NO: 1484 - protein, 7 aa, synthetic construct
  REGION 1..7: note = source = /note="Description of Artificial Sequence: Synthetic peptide"
TYGMSVG

SEQ ID NO: 1485 - protein, 5 aa, synthetic construct
  REGION 1..5: note = source = /note="Description of Artificial Sequence: Synthetic peptide"
SSGMQ

SEQ ID NO: 1486 - protein, 7 aa, synthetic construct
  REGION 1..7: note = source = /note="Description of Artificial Sequence: Synthetic peptide"
THGMGVG

SEQ ID NO: 1487 - protein, 7 aa, synthetic construct
  REGION 1..7: note = source = /note="Description of Artificial Sequence: Synthetic peptide"
TSGMVVS

SEQ ID NO: 1488 - protein, 5 aa, synthetic construct
  REGION 1..5: note = source = /note="Description of Artificial Sequence: Synthetic peptide"
GYAMH

SEQ ID NO: 1489 - protein, 5 aa, synthetic construct
  REGION 1..5: note = source = /note="Description of Artificial Sequence: Synthetic peptide"
DYYMA

SEQ ID NO: 1490 - protein, 5 aa, synthetic construct
  REGION 1..5: note = source = /note="Description of Artificial Sequence: Synthetic peptide"
SSGMQ

SEQ ID NO: 1491 - protein, 5 aa, synthetic construct
  REGION 1..5: note = source = /note="Description of Artificial Sequence: Synthetic peptide"
DYAFH

SEQ ID NO: 1492 - protein, 5 aa, synthetic construct
  REGION 1..5: note = source = /note="Description of Artificial Sequence: Synthetic peptide"
KYGMN

SEQ ID NO: 1493 - protein, 7 aa, synthetic construct
  REGION 1..7: note = source = /note="Description of Artificial Sequence: Synthetic peptide"
TYGMSVG

SEQ ID NO: 1494 - protein, 7 aa, synthetic construct
  REGION 1..7: note = source = /note="Description of Artificial Sequence: Synthetic peptide"
THGMGVG

SEQ ID NO: 1495 - protein, 7 aa, synthetic construct
  REGION 1..7: note = source = /note="Description of Artificial Sequence: Synthetic peptide"
TSGMVVS

SEQ ID NO: 1496 - protein, 5 aa, synthetic construct
  REGION 1..5: note = source = /note="Description of Artificial Sequence: Synthetic peptide"
GYAMH

SEQ ID NO: 1497 - protein, 17 aa, synthetic construct
  REGION 1..17: note = source = /note="Description of Artificial Sequence: Synthetic peptide"
WINTYSGKPTYADDFKG

SEQ ID NO: 1498 - protein, 17 aa, synthetic construct
  REGION 1..17: note = source = /note="Description of Artificial Sequence: Synthetic peptide"
SISSTSIYIYYADTVKG

SEQ ID NO: 1499 - protein, 16 aa, synthetic construct
  REGION 1..16: note = source = /note="Description of Artificial Sequence: Synthetic peptide"
SISYEGNPYYGDSVKG

SEQ ID NO: 1500 - protein, 16 aa, synthetic construct
  REGION 1..16: note = source = /note="Description of Artificial Sequence: Synthetic peptide"
DIWWDDDKHYNPSLKN

SEQ ID NO: 1501 - protein, 17 aa, synthetic construct
  REGION 1..17: note = source = /note="Description of Artificial Sequence: Synthetic peptide"
GIYYDSYKKSYADSVKG

SEQ ID NO: 1502 - protein, 16 aa, synthetic construct
  REGION 1..16: note = source = /note="Description of Artificial Sequence: Synthetic peptide"
NIWWDDDKYYNPSLKN

SEQ ID NO: 1503 - protein, 16 aa, synthetic construct
  REGION 1..16: note = source = /note="Description of Artificial Sequence: Synthetic peptide"
AIAWDGDKYYNPSLKS

SEQ ID NO: 1504 - protein, 17 aa, synthetic construct
  REGION 1..17: note = source = /note="Description of Artificial Sequence: Synthetic peptide"
WINTYSGKPTYADDFKG

SEQ ID NO: 1505 - protein, 16 aa, synthetic construct
  REGION 1..16: note = source = /note="Description of Artificial Sequence: Synthetic peptide"
SISYEGNPYYGDSVKG

SEQ ID NO: 1506 - protein, 17 aa, synthetic construct
  REGION 1..17: note = source = /note="Description of Artificial Sequence: Synthetic peptide"
GIYYDSYKKSYADSVKG

SEQ ID NO: 1507 - protein, 17 aa, synthetic construct
  REGION 1..17: note = source = /note="Description of Artificial Sequence: Synthetic peptide"
WINTYSGKPTYADDFKG

SEQ ID NO: 1508 - protein, 17 aa, synthetic construct
  REGION 1..17: note = source = /note="Description of Artificial Sequence: Synthetic peptide"
SISSTSIYIYYADTVKG

SEQ ID NO: 1509 - protein, 16 aa, synthetic construct
  REGION 1..16: note = source = /note="Description of Artificial Sequence: Synthetic peptide"
DIWWDDDKHYNPSLKN

SEQ ID NO: 1510 - protein, 16 aa, synthetic construct
  REGION 1..16: note = source = /note="Description of Artificial Sequence: Synthetic peptide"
NIWWDDDKYYNPSLKN

SEQ ID NO: 1511 - protein, 16 aa, synthetic construct
  REGION 1..16: note = source = /note="Description of Artificial Sequence: Synthetic peptide"
AIAWDGDKYYNPSLKS

SEQ ID NO: 1512 - protein, 17 aa, synthetic construct
  REGION 1..17: note = source = /note="Description of Artificial Sequence: Synthetic peptide"
WINTYSGKPTYADDFKG

SEQ ID NO: 1513 - protein, 12 aa, synthetic construct
  REGION 1..12: note = source = /note="Description of Artificial Sequence: Synthetic peptide"
GAYYGYRDWFTY

SEQ ID NO: 1514 - protein, 8 aa, synthetic construct
  REGION 1..8: note = source = /note="Description of Artificial Sequence: Synthetic peptide"
HDYSSYSY

SEQ ID NO: 1515 - protein, 11 aa, synthetic construct
  REGION 1..11: note = source = /note="Description of Artificial Sequence: Synthetic peptide"
HDHNNVDWFAY

SEQ ID NO: 1516 - protein, 14 aa, synthetic construct
  REGION 1..14: note = source = /note="Description of Artificial Sequence: Synthetic peptide"
SSTTDGIVTYVMDV

SEQ ID NO: 1517 - protein, 12 aa, synthetic construct
  REGION 1..12: note = source = /note="Description of Artificial Sequence: Synthetic peptide"
SAYYGYKDYFDY

SEQ ID NO: 1518 - protein, 13 aa, synthetic construct
  REGION 1..13: note = source = /note="Description of Artificial Sequence: Synthetic peptide"
IEGSPVVTTVFDY

SEQ ID NO: 1519 - protein, 12 aa, synthetic construct
  REGION 1..12: note = source = /note="Description of Artificial Sequence: Synthetic peptide"
RDYDVGYYYFDF

SEQ ID NO: 1520 - protein, 12 aa, synthetic construct
  REGION 1..12: note = source = /note="Description of Artificial Sequence: Synthetic peptide"
STYYGYKDWFAY

SEQ ID NO: 1521 - protein, 11 aa, synthetic construct
  REGION 1..11: note = source = /note="Description of Artificial Sequence: Synthetic peptide"
HDHNNVDWFAY

SEQ ID NO: 1522 - protein, 12 aa, synthetic construct
  REGION 1..12: note = source = /note="Description of Artificial Sequence: Synthetic peptide"
SAYYGYKDYFDY

SEQ ID NO: 1523 - protein, 12 aa, synthetic construct
  REGION 1..12: note = source = /note="Description of Artificial Sequence: Synthetic peptide"
GAYYGYRDWFTY

SEQ ID NO: 1524 - protein, 8 aa, synthetic construct
  REGION 1..8: note = source = /note="Description of Artificial Sequence: Synthetic peptide"
HDYSSYSY

SEQ ID NO: 1525 - protein, 14 aa, synthetic construct
  REGION 1..14: note = source = /note="Description of Artificial Sequence: Synthetic peptide"
SSTTDGIVTYVMDV

SEQ ID NO: 1526 - protein, 13 aa, synthetic construct
  REGION 1..13: note = source = /note="Description of Artificial Sequence: Synthetic peptide"
IEGSPVVTTVFDY

SEQ ID NO: 1527 - protein, 12 aa, synthetic construct
  REGION 1..12: note = source = /note="Description of Artificial Sequence: Synthetic peptide"
RDYDVGYYYFDF

SEQ ID NO: 1528 - protein, 12 aa, synthetic construct
  REGION 1..12: note = source = /note="Description of Artificial Sequence: Synthetic peptide"
STYYGYKDWFAY

SEQ ID NO: 1529 - protein, 10 aa, synthetic construct
  REGION 1..10: note = source = /note="Description of Artificial Sequence: Synthetic peptide"
YCARGNWDDY

What is claimed is:

1. A population of cells comprising:
(a) a first chimeric antigen receptor (CAR) molecule comprising an antigen-binding domain which is a CD19 binding domain, wherein the CD19 binding domain comprises a scFv comprising the LC CDR1, LC CDR2, LC CDR3, HC CDR1, HC CDR2, and HC CDR3 of FMC63; and
(b) a second CAR comprising an antigen-binding domain which is a CD20 binding domain.

2. The population of cells of claim 1, wherein the first CAR and the second CAR each comprise one, two, three, or all of:
(a) a transmembrane domain comprising a transmembrane domain of a protein selected from the group consisting of the alpha, beta, or zeta chain of the T-cell receptor, CD28, CD3 epsilon, CD45, CD4, CD5, CD8, CD9, CD16, CD22, CD33, CD37, CD64, CD80, CD86, CD134, CD137, and CD154, wherein optionally the CD19 and/or CD20 binding domain is connected to the transmembrane domain by a hinge region;
(b) a costimulatory domain that is a functional signaling domain obtained from a protein selected from the group consisting of CD28, 4-1BB (CD137), OX40, CD2, CD27, ICAM-1, LFA-1 (CD11a/CD18), and ICOS (CD278);
(c) an intracellular signaling domain that comprises a functional signaling domain of CD3 zeta or a functional signaling domain of 4-1BB; and
(d) leader sequence.

3. The population of cells of claim 2, wherein the first CAR further comprises a CD28 costimulatory domain and the second CAR further comprises a 4-1BB costimulatory domain.

4. The population of cells of claim 3 wherein:
(a) the CD28 costimulatory domain comprises an amino acid sequence of SEQ ID NO: 1317, or a sequence with 95-99% identity thereto; and/or
(b) the 4-1BB costimulatory domain comprises an amino acid sequence of SEQ ID NO: 16, or a sequence with 95-99% identity thereto.

5. The population of cells of claim 1, wherein the first CAR and second CAR each further comprise a CD3z signaling domain.

6. The population of cells of claim 5, wherein the CD3z signaling domain comprises an amino acid sequence of SEQ ID NO: 17 or 43, or a sequence with 95-99% identity thereto.

7. The population of cells of claim 1, wherein the population of cells comprises T cells or NK cells.

8. The population of cells of claim 1, wherein the first CAR is encoded by a first nucleic acid sequence and the second CAR is encoded by a second nucleic acid sequence, wherein the first and second nucleic acid sequences are disposed on a single nucleic acid molecule.

9. The population of cells of claim 8, wherein the first nucleic acid sequence and second nucleic acid sequence are connected by a nucleic acid encoding a T2A, P2A, E2A, or F2A site.

10. An isolated nucleic acid molecule comprising:
(i) a first nucleic acid sequence encoding a first CAR molecule comprising an antigen-binding domain which is a CD19 binding domain, wherein the CD19 binding domain comprises a scFv comprising the LC CDR1, LC CDR2, LC CDR3, HC CDR1, HC CDR2, and HC CDR3 of FMC6; and
(ii) a second nucleic acid sequence encoding a second CAR comprising an antigen-binding domain which is a CD20 binding domain,
wherein the first nucleic acid sequence and second nucleic acid sequence are in the same nucleic acid molecule.

11. The isolated nucleic acid molecule of claim 10, wherein the first CAR and the second CAR each comprise one, two, three, or all of:
(a) a transmembrane domain comprising a transmembrane domain of a protein selected from the group consisting of the alpha, beta, or zeta chain of the T-cell receptor, CD28, CD3 epsilon, CD45, CD4, CD5, CD8, CD9, CD16, CD22, CD33, CD37, CD64, CD80, CD86, CD134, CD137, and CD154, wherein optionally the CD19 and/or CD20 binding domain is connected to the transmembrane domain by a hinge region;
(b) a costimulatory domain that is a functional signaling domain obtained from a protein selected from the group consisting of CD28, 4-1BB (CD137), OX40, CD2, CD27, ICAM-1, LFA-1 (CD11a/CD18), and ICOS (CD278);
(c) an intracellular signaling domain that comprises a functional signaling domain of CD3 zeta or a functional signaling domain of 4-1BB; and
(d) leader sequence.

12. The isolated nucleic acid molecule of claim 11, wherein the first CAR further comprises a CD28 costimulatory domain and the second CAR further comprises a 4-1BB costimulatory domain.

13. The isolated nucleic acid molecule of claim 12, wherein:
(a) the CD28 costimulatory domain comprises a nucleic acid sequence of SEQ ID NO: 1318, or a sequence with 95-99% identity thereto; and/or
(b) the 4-1BB costimulatory domain comprises a nucleic acid sequence of SEQ ID NO: 60, or a sequence with 95-99% identity thereto.

14. The isolated nucleic acid molecule of claim 10, wherein the first CAR and second CAR each further comprise a CD3z signaling domain.

15. The isolated nucleic acid molecule of claim 14, wherein the CD3z signaling domain comprises a nucleic acid sequence of SEQ ID NO: 101 or 44, or a sequence with 95-99% identity thereto.

16. The isolated nucleic acid molecule of claim 10, wherein the first nucleic acid sequence and second nucleic acid sequence are connected by a nucleic acid encoding a T2A, P2A, E2A, or F2A site.

17. An isolated nucleic acid molecule comprising, in a 5′ to 3′ orientation: a nucleic acid sequence encoding an antigen-binding domain that binds to CD19 comprising a scFv comprising the LC CDR1, LC CDR2, LC CDR3, HC CDR1, HC CDR2, and HC CDR3 of FMC63; a nucleic acid sequence encoding a CD28 transmembrane domain; a nucleic acid sequence encoding a CD28 costimulatory domain; a nucleic acid sequence encoding a CD3z intracellular signaling domain; a nucleic acid sequence encoding a T2A, P2A, E2A, or F2A site; a nucleic acid sequence encoding an antigen-binding domain that binds to CD20; a nucleic acid sequence encoding a CD8 transmembrane domain; a nucleic acid sequence encoding a 4-1BB costimulatory domain; a nucleic acid sequence encoding a CD3z intracellular signaling domain.

18. A vector comprising the isolated nucleic acid molecule of claim 10.

19. A cell comprising the isolated nucleic acid molecule of claim 10.

20. A method of making a cell, comprising transducing the cell with the vector of claim 19.

21. A plurality of isolated CAR molecules encoded by the isolated nucleic acid molecule of claim 10.

22. A method of treating a cancer in a subject, the method comprising administering to the subject the population of cells of claim 1.

23. A method of treating a cancer in a subject, the method comprising administering to the subject, the isolated nucleic acid molecule of claim 10.

24. A method of treating a cancer in a subject, the method comprising administering to the subject, the cell of claim 19.
